(19) United States
(12) Patent Application Publication
(10) Pub. No.: US 2023/0068771 A1
(43) Pub. Date: Mar. 2, 2023

(54) EFFECTOR PROTEINS AND METHODS OF USE

(71) Applicant: Mammoth Biosciences, Inc., Brisbane, CA (US)

(72) Inventors: Benjamin Julius RAUCH, Oakland, CA (US); Aaron DELOUGHERY, San Francisco, CA (US); William Douglass WRIGHT, Fairfield, CA (US); David PAEZ-ESPINO, Concord, CA (US); Clarissa Oriel RHINES, San Mateo, CA (US); Lucas Benjamin HARRINGTON, San Francisco, CA (US); Wiputra Jaya HARTONO, San Francisco, CA (US)

(21) Appl. No.: 17/746,851

(22) Filed: May 17, 2022

Related U.S. Application Data
(63) Continuation of application No. PCT/US2022/028568, filed on May 10, 2022.
(60) Provisional application No. 63/316,358, filed on Mar. 3, 2022.
(60) Provisional application No. 63/290,600, filed on Dec. 16, 2021.
(60) Provisional application No. 63/220,286, filed on Jul. 9, 2021.
(60) Provisional application No. 63/220,137, filed on Jul. 9, 2021.
(60) Provisional application No. 63/186,700, filed on May 10, 2021.

(51) Int. Cl. C12N 15/11; C12N 9/22; C12N 15/113; C12N 15/10

(52) U.S. Cl. CPC C12N 15/111; C12N 9/22; C12N 15/113; C12N 15/102; C12N 2310/20

(57) ABSTRACT

Provided herein are compositions, systems, and methods comprising effector proteins and uses thereof. These effector proteins are shown to be active with guide RNAs and may be characterized as CRISPR-associated (Cas) proteins. Various compositions, systems, and methods of the present disclosure leverage the activities of these effector proteins for the modification, detection, and engineering of nucleic acids.

### CROSS REFERENCE TO RELATED APPLICATIONS

[0001] This application is a continuation of International Patent Application No. PCT/US22/28568, filed May 10, 2022, which claims the benefit of U.S. Provisional Application No. 63/186,700, filed May 10, 2021, U.S. Provisional Application No. 63/220,137, filed Jul. 9, 2021, U.S. Provisional Application No. 63/220,286, filed Jul. 9, 2021, U.S. Provisional Application No. 63/290,600, filed Dec. 16, 2021, and U.S. Provisional Application No. 63/316,358, filed Mar. 3, 2022, the disclosures of which are incorporated herein by reference in their entirety.

### SEQUENCE LISTING

[0002] The instant application contains a Sequence Listing which has been submitted electronically in ASCII format and is hereby incorporated by reference in its entirety. Said ASCII copy, created on Sep. 28, 2022, is named 203477-709201US_SequenceListing.txt and is 803,956 bytes size.

### BACKGROUND

[0003] Programmable nucleases are proteins that bind and cleave nucleic acids in a sequence-specific manner. A programmable nuclease may bind a target region of a nucleic acid and cleave the nucleic acid within the target region or at a position adjacent to the target region. In some instances, a programmable nuclease is activated when it binds a target region of a nucleic acid to cleave regions of the nucleic acid that are near, but not adjacent to the target region. A programmable nuclease, such as a CRISPR-associated (Cas) protein, may be coupled to a guide nucleic acid that imparts activity or sequence selectivity to the programmable nuclease. In general, guide nucleic acids comprise a CRISPR RNA (crRNA) that is at least partially complementary to a target nucleic acid. In some cases, guide nucleic acids comprise a trans-activating crRNA (tracrRNA), at least a portion of which interacts with the programmable nuclease. In some cases, guide nucleic acids comprise a repeat region or a handle region, at least a portion of which interacts with the programmable nuclease, wherein a handle region comprises at least a portion of a repeat region. In some cases, a tracrRNA or intermediary RNA is provided separately from the guide nucleic acid. The tracrRNA, repeat region, handle region, or any combination thereof may hybridize to a portion of the guide nucleic acid that does not hybridize to the target nucleic acid.

[0004] Programmable nucleases may cleave nucleic acids, including single stranded RNA (ssRNA), double stranded DNA (dsDNA), and single-stranded DNA (ssDNA). Programmable nucleases may provide cis cleavage activity, trans cleavage activity, nickase activity, or a combination thereof. Cis cleavage activity is cleavage of a target nucleic acid that is hybridized to a guide RNA (crRNA or sgRNA), wherein cleavage occurs within or directly adjacent to the region of the target nucleic acid that is hybridized to guideRNA. Trans cleavage activity (also referred to as transcollateral cleavage) is cleavage of ssDNA or ssRNA that is near, but not hybridized to the guide RNA. Trans cleavage activity is triggered by the hybridization of guide RNA to the target nucleic acid. Nickase activity is the selective cleavage of one strand of a dsDNA molecule. While certain programmable nucleases may be used to edit and detect nucleic acid molecules in a sequence specific manner, challenging biological sample conditions (e.g., high viscosity, metal chelating) may limit their accuracy and effectiveness. There is thus a need for systems and methods that employ programmable nucleases having specificity and efficiency across a wide range of sample conditions.

### SUMMARY

[0005] The present disclosure provides compositions, systems, and methods comprising effector protein and uses thereof. In general, the effector proteins are DNA modifying, are dual-guided (require a crRNA and tracrRNA, or a single guide RNA comprising portions of each, for activity), and are short (less than 700 linked amino acids in length). Thus, they are referred to herein as D2S effector proteins. Compositions, systems and methods disclosed herein leverage the nucleic acid modifying activities (e.g., cis cleavage activity and trans-collateral cleavage activity) of these D2S effector proteins for the modification, detection and engineering of target nucleic acids.

[0006] While other short, also referred to as “compact,” effectors may be known in the art, these D2S effectors are particularly compact, the majority being less than 500 amino acids in length, and several being less than 400 amino acids in length. This makes them particularly useful for delivery via viral vectors (e.g., AAV), where additional CRISPR system components, (e.g., guide RNA(s), donor nucleic acid, and promoters), may be incorporated into the same viral vector, thereby enabling more efficient viral production. Small size is especially useful for self-complementary AAV (scAAV) systems which have a very limited cargo size. In addition to their compact nature, they provide the ability to modify additional or alternative sequences relative to known effectors, due to their ability to recognize a variety of protospacer adjacent motifs (PAMs), see, e.g., Table 35. Many of the D2S effectors disclosed herein have high identity and similarity to CasM.19952, which has demonstrated “blunt” cutting, and may also provide blunt or short stagger cut ends. Blunt cutting may be advantageous over the staggered cutting that is provided by other nucleases, as there is a less likely chance of spontaneous (also referred to as perfect) repair which may decrease the chances of successful target modification and/or donor insertion.

### I. Certain Embodiments

[0007] Provided herein are compositions comprising an effector protein and an engineered guide nucleic acid, wherein the effector protein comprises an amino acid sequence that is at least 75%, at least 80%, at least 85%, at least 90%, at least 95%, at least 98%, at least 99% or 100% identical to SEQ ID NO: 1.

[0008] Also provided herein, are compositions comprising an effector protein and an engineered guide nucleic acid, wherein the effector protein comprises an amino acid sequence that is at least 75%, at least 80%, at least 85%, at least 90%, at least 95%, at least 98%, at least 99% or 100% identical to SEQ ID NO: 2.

[0009] Also provided herein, are compositions comprising an effector protein and an engineered guide nucleic acid, wherein the effector protein comprises an amino acid sequence that is at least 75%, at least 80%, at least 85%, at least 90%, at least 95%, at least 98%, at least 99% or 100% identical to SEQ ID NO: 3.

[0010] Also provided herein, are compositions comprising an effector protein and an engineered guide nucleic acid, wherein the effector protein comprises an amino acid sequence that is at least 75%, at least 80%, at least 85%, at least 90%, at least 95%, at least 98%, at least 99% or 100% identical to SEQ ID NO: 4.

[0011] Also provided herein, are compositions comprising an effector protein and an engineered guide nucleic acid, wherein the effector protein comprises an amino acid sequence that is at least 75%, at least 80%, at least 85%, at least 90%, at least 95%, at least 98%, at least 99% or 100% identical to SEQ ID NO: 5.

[0012] Also provided herein, are compositions comprising an effector protein and an engineered guide nucleic acid, wherein the effector protein comprises an amino acid sequence that is at least 75%, at least 80%, at least 85%, at least 90%, at least 95%, at least 98%, at least 99% or 100% identical to SEQ ID NO: 6.

[0013] Also provided herein, are compositions comprising an effector protein and an engineered guide nucleic acid, wherein the effector protein comprises an amino acid sequence that is at least 75%, at least 80%, at least 85%, at least 90%, at least 95%, at least 98%, at least 99% or 100% identical to SEQ ID NO: 7.

[0014] Also provided herein, are compositions comprising an effector protein and an engineered guide nucleic acid, wherein the effector protein comprises an amino acid sequence that is at least 75%, at least 80%, at least 85%, at least 90%, at least 95%, at least 98%, at least 99% or 100% identical to SEQ ID NO: 8.

[0015] Also provided herein, are compositions comprising an effector protein and an engineered guide nucleic acid, wherein the effector protein comprises an amino acid sequence that is at least 75%, at least 80%, at least 85%, at least 90%, at least 95%, at least 98%, at least 99% or 100% identical to SEQ ID NO: 9.

[0016] Also provided herein, are compositions comprising an effector protein and an engineered guide nucleic acid, wherein the effector protein comprises an amino acid sequence that is at least 75%, at least 80%, at least 85%, at least 90%, at least 95%, at least 98%, at least 99% or 100% identical to SEQ ID NO: 10.

[0017] Also provided herein, are compositions comprising an effector protein and an engineered guide nucleic acid, wherein the effector protein comprises an amino acid sequence that is at least 75%, at least 80%, at least 85%, at least 90%, at least 95%, at least 98%, at least 99% or 100% identical to SEQ ID NO: 11.

[0018] Also provided herein, are compositions comprising an effector protein and an engineered guide nucleic acid, wherein the effector protein comprises an amino acid sequence that is at least 75%, at least 80%, at least 85%, at least 90%, at least 95%, at least 98%, at least 99% or 100% identical to SEQ ID NO: 12.

[0019] Also provided herein, are compositions comprising an effector protein and an engineered guide nucleic acid, wherein the effector protein comprises an amino acid sequence that is at least 75%, at least 80%, at least 85%, at least 90%, at least 95%, at least 98%, at least 99% or 100% identical to SEQ ID NO: 13.

[0020] Also provided herein, are compositions comprising an effector protein and an engineered guide nucleic acid, wherein the effector protein comprises an amino acid sequence that is at least 75%, at least 80%, at least 85%, at least 90%, at least 95%, at least 98%, at least 99% or 100% identical to SEQ ID NO: 14.

[0021] Also provided herein, are compositions comprising an effector protein and an engineered guide nucleic acid, wherein the effector protein comprises an amino acid sequence that is at least 75%, at least 80%, at least 85%, at least 90%, at least 95%, at least 98%, at least 99% or 100% identical to SEQ ID NO: 15.

[0022] Also provided herein, are compositions comprising an effector protein and an engineered guide nucleic acid, wherein the effector protein comprises an amino acid sequence that is at least 75%, at least 80%, at least 85%, at least 90%, at least 95%, at least 98%, at least 99% or 100% identical to SEQ ID NO: 16.

[0023] Also provided herein, are compositions comprising an effector protein and an engineered guide nucleic acid, wherein the effector protein comprises an amino acid sequence that is at least 75%, at least 80%, at least 85%, at least 90%, at least 95%, at least 98%, at least 99% or 100% identical to SEQ ID NO: 17.

[0024] Also provided herein, are compositions comprising an effector protein and an engineered guide nucleic acid, wherein the effector protein comprises an amino acid sequence that is at least 75%, at least 80%, at least 85%, at least 90%, at least 95%, at least 98%, at least 99% or 100% identical to SEQ ID NO: 18.

[0025] Also provided herein, are compositions comprising an effector protein and an engineered guide nucleic acid, wherein the effector protein comprises an amino acid sequence that is at least 75%, at least 80%, at least 85%, at least 90%, at least 95%, at least 98%, at least 99% or 100% identical to SEQ ID NO: 19.

[0026] Also provided herein, are compositions comprising an effector protein and an engineered guide nucleic acid, wherein the effector protein comprises an amino acid sequence that is at least 75%, at least 80%, at least 85%, at least 90%, at least 95%, at least 98%, at least 99% or 100% identical to SEQ ID NO: 20.

[0027] Also provided herein, are compositions comprising an effector protein and an engineered guide nucleic acid, wherein the effector protein comprises an amino acid sequence that is at least 75%, at least 80%, at least 85%, at least 90%, at least 95%, at least 98%, at least 99% or 100% identical to SEQ ID NO: 21.

[0028] Also provided herein, are compositions comprising an effector protein and an engineered guide nucleic acid, wherein the effector protein comprises an amino acid sequence that is at least 75%, at least 80%, at least 85%, at least 90%, at least 95%, at least 98%, at least 99% or 100% identical to SEQ ID NO: 22.

[0029] Also provided herein, are compositions comprising an effector protein and an engineered guide nucleic acid, wherein the effector protein comprises an amino acid sequence that is at least 75%, at least 80%, at least 85%, at least 90%, at least 95%, at least 98%, at least 99% or 100% identical to SEQ ID NO: 23.

[0030] Also provided herein, are compositions comprising an effector protein and an engineered guide nucleic acid, wherein the effector protein comprises an amino acid sequence that is at least 75%, at least 80%, at least 85%, at least 90%, at least 95%, at least 98%, at least 99% or 100% identical to SEQ ID NO: 24.

[0031] Also provided herein, are compositions comprising an effector protein and an engineered guide nucleic acid, wherein the effector protein comprises an amino acid sequence that is at least 75%, at least 80%, at least 85%, at least 90%, at least 95%, at least 98%, at least 99% or 100% identical to SEQ ID NO: 25.

[0032] Also provided herein, are compositions comprising an effector protein and an engineered guide nucleic acid, wherein the effector protein comprises an amino acid sequence that is at least 75%, at least 80%, at least 85%, at least 90%, at least 95%, at least 98%, at least 99% or 100% identical to SEQ ID NO: 26.

[0033] Also provided herein, are compositions comprising an effector protein and an engineered guide nucleic acid, wherein the effector protein comprises an amino acid sequence that is at least 75%, at least 80%, at least 85%, at least 90%, at least 95%, at least 98%, at least 99% or 100% identical to SEQ ID NO: 27.

[0034] Also provided herein, are compositions comprising an effector protein and an engineered guide nucleic acid, wherein the effector protein comprises an amino acid sequence that is at least 75%, at least 80%, at least 85%, at least 90%, at least 95%, at least 98%, at least 99% or 100% identical to SEQ ID NO: 28.

[0035] Also provided herein, are compositions comprising an effector protein and an engineered guide nucleic acid, wherein the effector protein comprises an amino acid sequence that is at least 75%, at least 80%, at least 85%, at least 90%, at least 95%, at least 98%, at least 99% or 100% identical to SEQ ID NO: 29.

[0036] Also provided herein, are compositions comprising an effector protein and an engineered guide nucleic acid, wherein the effector protein comprises an amino acid sequence that is at least 75%, at least 80%, at least 85%, at least 90%, at least 95%, at least 98%, at least 99% or 100% identical to SEQ ID NO: 30.

[0037] Also provided herein, is a composition comprising an effector protein and an engineered guide nucleic acid, wherein the effector protein comprises an amino acid sequence that is at least 75%, at least 80%, at least 85%, at least 90%, at least 95%, at least 98%, at least 99% or 100% identical to SEQ ID NO: 31.

[0038] Also provided herein, are compositions comprising an effector protein and an engineered guide nucleic acid, wherein the effector protein comprises an amino acid sequence that is at least 75%, at least 80%, at least 85%, at least 90%, at least 95%, at least 98%, at least 99% or 100% identical to SEQ ID NO: 32.

[0039] Also provided herein, are compositions comprising an effector protein and an engineered guide nucleic acid, wherein the effector protein comprises an amino acid sequence that is at least 75%, at least 80%, at least 85%, at least 90%, at least 95%, at least 98%, at least 99% or 100% identical to SEQ ID NO: 33.

[0040] Also provided herein, are compositions comprising an effector protein and an engineered guide nucleic acid, wherein the effector protein comprises an amino acid sequence that is at least 75%, at least 80%, at least 85%, at least 90%, at least 95%, at least 98%, at least 99% or 100% identical to SEQ ID NO: 34.

[0041] Also provided herein, are compositions comprising an effector protein and an engineered guide nucleic acid, wherein the effector protein comprises an amino acid sequence that is at least 75%, at least 80%, at least 85%, at least 90%, at least 95%, at least 98%, at least 99% or 100% identical to SEQ ID NO: 35.

[0042] Also provided herein, are compositions comprising an effector protein and an engineered guide nucleic acid, wherein the effector protein comprises an amino acid sequence that is at least 75%, at least 80%, at least 85%, at least 90%, at least 95%, at least 98%, at least 99% or 100% identical to SEQ ID NO: 36.

[0043] Also provided herein, are compositions comprising an effector protein and an engineered guide nucleic acid, wherein the effector protein comprises an amino acid sequence that is at least 75%, at least 80%, at least 85%, at least 90%, at least 95%, at least 98%, at least 99% or 100% identical to SEQ ID NO: 37.

[0044] Also provided herein, are compositions comprising an effector protein and an engineered guide nucleic acid, wherein the effector protein comprises an amino acid sequence that is at least 75%, at least 80%, at least 85%, at least 90%, at least 95%, at least 98%, at least 99% or 100% identical to SEQ ID NO: 38.

[0045] Also provided herein, are compositions comprising an effector protein and an engineered guide nucleic acid, wherein the effector protein comprises an amino acid sequence that is at least 75%, at least 80%, at least 85%, at least 90%, at least 95%, at least 98%, at least 99% or 100% identical to SEQ ID NO: 39.

[0046] Also provided herein, are compositions comprising an effector protein and an engineered guide nucleic acid, wherein the effector protein comprises an amino acid sequence that is at least 75%, at least 80%, at least 85%, at least 90%, at least 95%, at least 98%, at least 99% or 100% identical to SEQ ID NO: 40.

[0047] Also provided herein, are compositions comprising an effector protein and an engineered guide nucleic acid, wherein the effector protein comprises an amino acid sequence that is at least 75%, at least 80%, at least 85%, at least 90%, at least 95%, at least 98%, at least 99% or 100% identical to SEQ ID NO: 41.

[0048] Also provided herein, are compositions comprising an effector protein and an engineered guide nucleic acid, wherein the effector protein comprises an amino acid sequence that is at least 75%, at least 80%, at least 85%, at least 90%, at least 95%, at least 98%, at least 99% or 100% identical to SEQ ID NO: 42.

[0049] Also provided herein, are compositions comprising an effector protein and an engineered guide nucleic acid, wherein the effector protein comprises an amino acid sequence that is at least 75%, at least 80%, at least 85%, at least 90%, at least 95%, at least 98%, at least 99% or 100% identical to SEQ ID NO: 43.

[0050] Also provided herein, are compositions comprising an effector protein and an engineered guide nucleic acid, wherein the effector protein comprises an amino acid sequence that is at least 75%, at least 80%, at least 85%, at least 90%, at least 95%, at least 98%, at least 99% or 100% identical to SEQ ID NO: 44.

[0051] Also provided herein, are compositions comprising an effector protein and an engineered guide nucleic acid, wherein the effector protein comprises an amino acid sequence that is at least 75%, at least 80%, at least 85%, at least 90%, at least 95%, at least 98%, at least 99% or 100% identical to SEQ ID NO: 45.

[0052] Also provided herein, are compositions comprising an effector protein and an engineered guide nucleic acid, wherein the effector protein comprises an amino acid sequence that is at least 75%, at least 80%, at least 85%, at least 90%, at least 95%, at least 98%, at least 99% or 100% identical to SEQ ID NO: 202.

[0053] Also provided herein, are compositions comprising an effector protein and an engineered guide nucleic acid, wherein the effector protein comprises an amino acid sequence that is at least 75%, at least 80%, at least 85%, at least 90%, at least 95%, at least 98%, at least 99% or 100% identical to SEQ ID NO: 203.

[0054] Also provided herein, are compositions comprising an effector protein and an engineered guide nucleic acid, wherein the effector protein comprises an amino acid sequence that is at least 75%, at least 80%, at least 85%, at least 90%, at least 95%, at least 98%, at least 99% or 100% identical to SEQ ID NO: 204.

[0055] Also provided herein, are compositions comprising an effector protein and an engineered guide nucleic acid, wherein the effector protein comprises an amino acid sequence that is at least 75%, at least 80%, at least 85%, at least 90%, at least 95%, at least 98%, at least 99% or 100% identical to SEQ ID NO: 205.

[0056] Also provided herein, are compositions comprising an effector protein and an engineered guide nucleic acid, wherein the effector protein comprises an amino acid sequence that is at least 75%, at least 80%, at least 85%, at least 90%, at least 95%, at least 98%, at least 99% or 100% identical to SEQ ID NO: 206.

[0057] Also provided herein, are compositions comprising an effector protein and an engineered guide nucleic acid, wherein the effector protein comprises an amino acid sequence that is at least 75%, at least 80%, at least 85%, at least 90%, at least 95%, at least 98%, at least 99% or 100% identical to SEQ ID NO: 207.

[0058] Also provided herein, are compositions comprising an effector protein and an engineered guide nucleic acid, wherein the effector protein comprises an amino acid sequence that is at least 75%, at least 80%, at least 85%, at least 90%, at least 95%, at least 98%, at least 99% or 100% identical to SEQ ID NO: 208.

[0059] Also provided herein, are compositions comprising an effector protein and an engineered guide nucleic acid, wherein the effector protein comprises an amino acid sequence that is at least 75%, at least 80%, at least 85%, at least 90%, at least 95%, at least 98%, at least 99% or 100% identical to SEQ ID NO: 209.

[0060] Also provided herein, are compositions comprising an effector protein and an engineered guide nucleic acid, wherein the effector protein comprises an amino acid sequence that is at least 75%, at least 80%, at least 85%, at least 90%, at least 95%, at least 98%, at least 99% or 100% identical to SEQ ID NO: 210.

[0061] Also provided herein, are compositions comprising an effector protein and an engineered guide nucleic acid, wherein the effector protein comprises an amino acid sequence that is at least 75%, at least 80%, at least 85%, at least 90%, at least 95%, at least 98%, at least 99% or 100% identical to SEQ ID NO: 211.

[0062] Also provided herein, are compositions comprising an effector protein and an engineered guide nucleic acid, wherein the effector protein comprises an amino acid sequence that is at least 75%, at least 80%, at least 85%, at least 90%, at least 95%, at least 98%, at least 99% or 100% identical to SEQ ID NO: 212.

[0063] Also provided herein, are compositions comprising an effector protein and an engineered guide nucleic acid, wherein the effector protein comprises an amino acid sequence that is at least 75%, at least 80%, at least 85%, at least 90%, at least 95%, at least 98%, at least 99% or 100% identical to SEQ ID NO: 213.

[0064] Also provided herein, are compositions comprising an effector protein and an engineered guide nucleic acid, wherein the effector protein comprises an amino acid sequence that is at least 75%, at least 80%, at least 85%, at least 90%, at least 95%, at least 98%, at least 99% or 100% identical to SEQ ID NO: 214.

[0065] Also provided herein, are compositions comprising an effector protein and an engineered guide nucleic acid, wherein the effector protein comprises an amino acid sequence that is at least 75%, at least 80%, at least 85%, at least 90%, at least 95%, at least 98%, at least 99% or 100% identical to SEQ ID NO: 215.

[0066] Also provided herein, are compositions comprising an effector protein and an engineered guide nucleic acid, wherein the effector protein comprises an amino acid sequence that is at least 75%, at least 80%, at least 85%, at least 90%, at least 95%, at least 98%, at least 99% or 100% identical to SEQ ID NO: 216.

[0067] Also provided herein, are compositions comprising an effector protein and an engineered guide nucleic acid, wherein the effector protein comprises an amino acid sequence that is at least 75%, at least 80%, at least 85%, at least 90%, at least 95%, at least 98%, at least 99% or 100% identical to SEQ ID NO: 217.

[0068] Also provided herein, are compositions comprising an effector protein and an engineered guide nucleic acid, wherein the effector protein comprises an amino acid sequence that is at least 75%, at least 80%, at least 85%, at least 90%, at least 95%, at least 98%, at least 99% or 100% identical to SEQ ID NO: 218.

[0069] Also provided herein, are compositions comprising an effector protein and an engineered guide nucleic acid, wherein the effector protein comprises an amino acid sequence that is at least 75%, at least 80%, at least 85%, at least 90%, at least 95%, at least 98%, at least 99% or 100% identical to SEQ ID NO: 219.

[0070] Also provided herein, are compositions comprising an effector protein and an engineered guide nucleic acid, wherein the effector protein comprises an amino acid sequence that is at least 75%, at least 80%, at least 85%, at least 90%, at least 95%, at least 98%, at least 99% or 100% identical to SEQ ID NO: 220.

[0071] Also provided herein, are compositions comprising an effector protein and an engineered guide nucleic acid, wherein the effector protein comprises an amino acid sequence that is at least 75%, at least 80%, at least 85%, at least 90%, at least 95%, at least 98%, at least 99% or 100% identical to SEQ ID NO: 221.

[0072] Also provided herein, are compositions comprising an effector protein and an engineered guide nucleic acid, wherein the effector protein comprises an amino acid sequence that is at least 75%, at least 80%, at least 85%, at least 90%, at least 95%, at least 98%, at least 99% or 100% identical to SEQ ID NO: 222.

[0073] Also provided herein, are compositions comprising an effector protein and an engineered guide nucleic acid, wherein the effector protein comprises an amino acid sequence that is at least 75%, at least 80%, at least 85%, at least 90%, at least 95%, at least 98%, at least 99% or 100% identical to SEQ ID NO: 223.

[0074] Also provided herein, are compositions comprising an effector protein and an engineered guide nucleic acid, wherein the effector protein comprises an amino acid sequence that is at least 75%, at least 80%, at least 85%, at least 90%, at least 95%, at least 98%, at least 99% or 100% identical to SEQ ID NO: 224.

[0075] Also provided herein, are compositions comprising an effector protein and an engineered guide nucleic acid, wherein the effector protein comprises an amino acid sequence that is at least 75%, at least 80%, at least 85%, at least 90%, at least 95%, at least 98%, at least 99% or 100% identical to SEQ ID NO: 225.

[0076] Also provided herein, are compositions comprising an effector protein and an engineered guide nucleic acid, wherein the effector protein comprises an amino acid sequence that is at least 75%, at least 80%, at least 85%, at least 90%, at least 95%, at least 98%, at least 99% or 100% identical to SEQ ID NO: 226.

[0077] Also provided herein, are compositions comprising an effector protein and an engineered guide nucleic acid, wherein the effector protein comprises an amino acid sequence that is at least 75%, at least 80%, at least 85%, at least 90%, at least 95%, at least 98%, at least 99% or 100% identical to SEQ ID NO: 227.

[0078] Also provided herein, are compositions comprising an effector protein and an engineered guide nucleic acid, wherein the effector protein comprises an amino acid sequence that is at least 75%, at least 80%, at least 85%, at least 90%, at least 95%, at least 98%, at least 99% or 100% identical to SEQ ID NO: 228.

[0079] Also provided herein, are compositions comprising an effector protein and an engineered guide nucleic acid, wherein the effector protein comprises an amino acid sequence that is at least 75%, at least 80%, at least 85%, at least 90%, at least 95%, at least 98%, at least 99% or 100% identical to SEQ ID NO: 229.

[0080] Also provided herein, are compositions comprising an effector protein and an engineered guide nucleic acid, wherein the effector protein comprises an amino acid sequence that is at least 75%, at least 80%, at least 85%, at least 90%, at least 95%, at least 98%, at least 99% or 100% identical to SEQ ID NO: 230.

[0081] Also provided herein, are compositions comprising an effector protein and an engineered guide nucleic acid, wherein the effector protein comprises an amino acid sequence that is at least 75%, at least 80%, at least 85%, at least 90%, at least 95%, at least 98%, at least 99% or 100% identical to SEQ ID NO: 231.

[0082] Also provided herein, are compositions comprising an effector protein and an engineered guide nucleic acid, wherein the effector protein comprises an amino acid sequence that is at least 75%, at least 80%, at least 85%, at least 90%, at least 95%, at least 98%, at least 99% or 100% identical to SEQ ID NO: 232.

[0083] Also provided herein, are compositions comprising an effector protein and an engineered guide nucleic acid, wherein the effector protein comprises an amino acid sequence that is at least 75%, at least 80%, at least 85%, at least 90%, at least 95%, at least 98%, at least 99% or 100% identical to SEQ ID NO: 233.

[0084] Also provided herein, are compositions comprising an effector protein and an engineered guide nucleic acid, wherein the effector protein comprises an amino acid sequence that is at least 75%, at least 80%, at least 85%, at least 90%, at least 95%, at least 98%, at least 99% or 100% identical to SEQ ID NO: 234.

[0085] Also provided herein, are compositions comprising an effector protein and an engineered guide nucleic acid, wherein the effector protein comprises an amino acid sequence that is at least 75%, at least 80%, at least 85%, at least 90%, at least 95%, at least 98%, at least 99% or 100% identical to SEQ ID NO: 235.

[0086] Also provided herein, are compositions comprising an effector protein and an engineered guide nucleic acid, wherein the effector protein comprises an amino acid sequence that is at least 75%, at least 80%, at least 85%, at least 90%, at least 95%, at least 98%, at least 99% or 100% identical to SEQ ID NO: 236.

[0087] Also provided herein, are compositions comprising an effector protein and an engineered guide nucleic acid, wherein the effector protein comprises an amino acid sequence that is at least 75%, at least 80%, at least 85%, at least 90%, at least 95%, at least 98%, at least 99% or 100% identical to SEQ ID NO: 237.

[0088] Also provided herein, are compositions comprising an effector protein and an engineered guide nucleic acid, wherein the effector protein comprises an amino acid sequence that is at least 75%, at least 80%, at least 85%, at least 90%, at least 95%, at least 98%, at least 99% or 100% identical to SEQ ID NO: 238.

[0089] Also provided herein, are compositions comprising an effector protein and an engineered guide nucleic acid, wherein the effector protein comprises an amino acid sequence that is at least 75%, at least 80%, at least 85%, at least 90%, at least 95%, at least 98%, at least 99% or 100% identical to SEQ ID NO: 239.

[0090] Also provided herein, are compositions comprising an effector protein and an engineered guide nucleic acid, wherein the effector protein comprises an amino acid sequence that is at least 75%, at least 80%, at least 85%, at least 90%, at least 95%, at least 98%, at least 99% or 100% identical to SEQ ID NO: 240.

[0091] Also provided herein, are compositions comprising an effector protein and an engineered guide nucleic acid, wherein the effector protein comprises an amino acid sequence that is at least 75%, at least 80%, at least 85%, at least 90%, at least 95%, at least 98%, at least 99% or 100% identical to SEQ ID NO: 728.

[0092] Also provided herein, are compositions comprising an effector protein and an engineered guide nucleic acid, wherein the effector protein comprises an amino acid sequence that is at least 75%, at least 80%, at least 85%, at least 90%, at least 95%, at least 98%, at least 99% or 100% identical to SEQ ID NO: 729.

[0093] Also provided herein, are compositions comprising an effector protein and an engineered guide nucleic acid, wherein the effector protein comprises an amino acid sequence that is at least 75%, at least 80%, at least 85%, at least 90%, at least 95%, at least 98%, at least 99% or 100% identical to SEQ ID NO: 730.

[0094] Also provided herein, are compositions comprising an effector protein and an engineered guide nucleic acid, wherein the effector protein comprises an amino acid sequence that is at least 75%, at least 80%, at least 85%, at least 90%, at least 95%, at least 98%, at least 99% or 100% identical to SEQ ID NO: 731.

[0095] Also provided herein, are compositions comprising an effector protein and an engineered guide nucleic acid, wherein the amino acid sequence of the effector protein comprises one or more amino acid alteration.

[0096] Also provided herein, are compositions comprising an effector protein and an engineered guide nucleic acid, wherein the amino acid sequence of the effector protein comprises one or more amino acid alteration in one or more domain comprising a REC domain, RuvC-I domain, or a RuvC-II domain.

[0097] Also provided herein, are compositions comprising an effector protein and an engineered guide nucleic acid, wherein the amino acid sequence of the effector protein comprises: one or more amino acid alteration at a position corresponding to 110, 111, 112, 113, 114, 115, 116, 117, 118, 119, 122, 123, 124, 125, 126, 127, 128, 129, 130, 131, or 132 in a REC domain; one or more amino acid alteration at a position corresponding to 261, 263, 264, 265, 266, 267, 268, 269, 270, 271, 272, 273, 274, 275, 276, 277, 278, 279, 280, 281 or 282 in a RuvC-I domain; one or more amino acid alteration at a position corresponding to 457, 458, 459, 460, 461, 462, 463, 464, 466, 467 or 468 in a RuvC-II domain; or any combination thereof.

[0098] Also provided herein, are compositions comprising an effector protein and an engineered guide nucleic acid, wherein the amino acid sequence of the effector protein comprises one or more amino acid alteration: T115R, T124R, L126R, E127R, T128R, N129R, or A132R in a REC domain; K261R, V263R, T278R, T281R, or E282R in a RuvC-I domain; N459R, S460R, D462R, K466R, N467R, or E468R in a RuvC-II domain; or any combination thereof.

[0099] Also provided herein, are compositions comprising an effector protein and an engineered guide nucleic acid, wherein the amino acid sequence of the effector protein comprises one or more amino acid alteration at a position corresponding to one or more residue A110, T111, E112, M113, S114, T115, Q116, S117, L118, S119, F122, A123, T124, E125, L126, E127, T128, N129, 1130, F131, A132, K261, V263, V264, G265, V266, D267, L268, G269, 1270, N271, V272, P273, A274, Y275, V276, A277, T278, N279, 1280, T281, E282, E363, 1457, A458, N459, S460, K461, D462, 1463, 1464, K466, N467, E468, or any combination thereof.

[0100] Also provided herein, are compositions comprising an effector protein and an engineered guide nucleic acid, wherein the effector protein amino acid sequence comprises one or more amino acid alteration comprising one or more of A110R, T111R, E112R, M113R, S114R, T115R, Q116R, S117R, L118R, S119R, F122R, A123R, T124R, E125R, L126R, E127R, T128R, N129R, 1130R, F131R, A132R, K261R, V263R, V264R, G265R, V266R, D267R, D267A, D267N, L268R, G269R, 1270R, N271R, V272R, P273R, A274R, Y275R, V276R, A277R, T278R, N279R, 1280R, T281R, E282R, E363Q, I457R, A458R, N459R, S460R, K461R, D462R, I463R, I464R, K466R, N467R, E468R or any combination thereof.

[0101] Also provided herein, are compositions comprising an effector protein and an engineered guide nucleic acid, wherein the effector protein amino acid sequence comprises one or more amino acid alteration comprising one or more of D267A, E363Q, or both.

[0102] Also provided herein, are compositions comprising an effector protein and an engineered guide nucleic acid, wherein the effector protein amino acid sequence comprises one or more amino acid alteration comprising one or more of D267N, E363Q, or both.

[0103] Also provided herein, are compositions comprising an effector protein and an engineered guide nucleic acid, wherein the effector protein amino acid sequence comprises one or more amino acid alteration comprising one or more of T115R, T124R, L126R, E127R, T128R, N129R, A132R, K261R, V263R, T278R, T281R, E282R, N459R, S460R, D462R, K466R, N467R, E468R or any combination thereof.

[0104] Also provided herein, are compositions comprising an effector protein and an engineered guide nucleic acid, wherein the effector protein amino acid sequence comprises one or more amino acid alteration comprising one or more of T124R, T128R, N129R, T278R, E282R, T281R, or any combination thereof.

[0105] Also provided herein, are compositions comprising an effector protein and an engineered guide nucleic acid, wherein the amino acid sequence of the effector protein comprises a T124R, T128R or N129R amino acid alteration.

[0106] Also provided herein, are compositions comprising an effector protein and an engineered guide nucleic acid, wherein the amino acid sequence of the effector protein comprises a T278R, E282R, or T281R amino acid alteration.

[0107] Also provided herein, are compositions comprising an effector protein and an engineered guide nucleic acid, wherein the amino acid sequence of the effector protein, other than a A110R amino acid alteration, is at least 75%, at least 80%, at least 85%, at least 90%, at least 95%, at least 98%, at least 99% or 100% identical to SEQ ID NO: 241.

[0108] Also provided herein, are compositions comprising an effector protein and an engineered guide nucleic acid, wherein the amino acid sequence of the effector protein, other than a T111R amino acid alteration, is at least 75%, at least 80%, at least 85%, at least 90%, at least 95%, at least 98%, at least 99% or 100% identical to SEQ ID NO: 242.

[0109] Also provided herein, are compositions comprising an effector protein and an engineered guide nucleic acid, wherein the amino acid sequence of the effector protein, other than a E112R amino acid alteration, is at least 75%, at least 80%, at least 85%, at least 90%, at least 95%, at least 98%, at least 99% or 100% identical to SEQ ID NO: 243.

[0110] Also provided herein, are compositions comprising an effector protein and an engineered guide nucleic acid, wherein the amino acid sequence of the effector protein, other than a M113R amino acid alteration, is at least 75%, at least 80%, at least 85%, at least 90%, at least 95%, at least 98%, at least 99% or 100% identical to SEQ ID NO: 244.

[0111] Also provided herein, are compositions comprising an effector protein and an engineered guide nucleic acid, wherein the amino acid sequence of the effector protein, other than a S114R amino acid alteration, is at least 75%, at least 80%, at least 85%, at least 90%, at least 95%, at least 98%, at least 99% or 100% identical to SEQ ID NO: 245.

[0112] Also provided herein, are compositions comprising an effector protein and an engineered guide nucleic acid, wherein the amino acid sequence of the effector protein, other than a T115R amino acid alteration, is at least 75%, at least 80%, at least 85%, at least 90%, at least 95%, at least 98%, at least 99% or 100% identical to SEQ ID NO: 246.

[0113] Also provided herein, are compositions comprising an effector protein and an engineered guide nucleic acid, wherein the amino acid sequence of the effector protein, other than a Q116R amino acid alteration, is at least 75%, at least 80%, at least 85%, at least 90%, at least 95%, at least 98%, at least 99% or 100% identical to SEQ ID NO: 247.

[0114] Also provided herein, are compositions comprising an effector protein and an engineered guide nucleic acid, wherein the amino acid sequence of the effector protein, other than a S117R amino acid alteration, is at least 75%, at least 80%, at least 85%, at least 90%, at least 95%, at least 98%, at least 99% or 100% identical to SEQ ID NO: 248.

[0115] Also provided herein, are compositions comprising an effector protein and an engineered guide nucleic acid, wherein the amino acid sequence of the effector protein, other than a L118R amino acid alteration, is at least 75%, at least 80%, at least 85%, at least 90%, at least 95%, at least 98%, at least 99% or 100% identical to SEQ ID NO: 249.

[0116] Also provided herein, are compositions comprising an effector protein and an engineered guide nucleic acid, wherein the amino acid sequence of the effector protein, other than a S119R amino acid alteration, is at least 75%, at least 80%, at least 85%, at least 90%, at least 95%, at least 98%, at least 99% or 100% identical to SEQ ID NO: 250.

[0117] Also provided herein, are compositions comprising an effector protein and an engineered guide nucleic acid, wherein the amino acid sequence of the effector protein, other than a F122R amino acid alteration, is at least 75%, at least 80%, at least 85%, at least 90%, at least 95%, at least 98%, at least 99% or 100% identical to SEQ ID NO: 251.

[0118] Also provided herein, are compositions comprising an effector protein and an engineered guide nucleic acid, wherein the amino acid sequence of the effector protein, other than a A123R amino acid alteration, is at least 75%, at least 80%, at least 85%, at least 90%, at least 95%, at least 98%, at least 99% or 100% identical to SEQ ID NO: 252.

[0119] Also provided herein, are compositions comprising an effector protein and an engineered guide nucleic acid, wherein the amino acid sequence of the effector protein, other than a T124R amino acid alteration, is at least 75%, at least 80%, at least 85%, at least 90%, at least 95%, at least 98%, at least 99% or 100% identical to SEQ ID NO: 253.

[0120] Also provided herein, are compositions comprising an effector protein and an engineered guide nucleic acid, wherein the amino acid sequence of the effector protein, other than a E125R amino acid alteration, is at least 75%, at least 80%, at least 85%, at least 90%, at least 95%, at least 98%, at least 99% or 100% identical to SEQ ID NO: 254.

[0121] Also provided herein, are compositions comprising an effector protein and an engineered guide nucleic acid, wherein the amino acid sequence of the effector protein, other than a L126R amino acid alteration, is at least 75%, at least 80%, at least 85%, at least 90%, at least 95%, at least 98%, at least 99% or 100% identical to SEQ ID NO: 255.

[0122] Also provided herein, are compositions comprising an effector protein and an engineered guide nucleic acid, wherein the amino acid sequence of the effector protein, other than a E127R amino acid alteration, is at least 75%, at least 80%, at least 85%, at least 90%, at least 95%, at least 98%, at least 99% or 100% identical to SEQ ID NO: 256.

[0123] Also provided herein, are compositions comprising an effector protein and an engineered guide nucleic acid, wherein the amino acid sequence of the effector protein, other than a T128R amino acid alteration, is at least 75%, at least 80%, at least 85%, at least 90%, at least 95%, at least 98%, at least 99% or 100% identical to SEQ ID NO: 257.

[0124] Also provided herein, are compositions comprising an effector protein and an engineered guide nucleic acid, wherein the amino acid sequence of the effector protein, other than a N129R amino acid alteration, is at least 75%, at least 80%, at least 85%, at least 90%, at least 95%, at least 98%, at least 99% or 100% identical to SEQ ID NO: 258.

[0125] Also provided herein, are compositions comprising an effector protein and an engineered guide nucleic acid, wherein the amino acid sequence of the effector protein, other than a 1130R amino acid alteration, is at least 75%, at least 80%, at least 85%, at least 90%, at least 95%, at least 98%, at least 99% or 100% identical to SEQ ID NO: 259.

[0126] Also provided herein, are compositions comprising an effector protein and an engineered guide nucleic acid, wherein the amino acid sequence of the effector protein, other than a F131R amino acid alteration, is at least 75%, at least 80%, at least 85%, at least 90%, at least 95%, at least 98%, at least 99% or 100% identical to SEQ ID NO: 260.

[0127] Also provided herein, are compositions comprising an effector protein and an engineered guide nucleic acid, wherein the amino acid sequence of the effector protein, other than a A132R amino acid alteration, is at least 75%, at least 80%, at least 85%, at least 90%, at least 95%, at least 98%, at least 99% or 100% identical to SEQ ID NO: 261.

[0128] Also provided herein, are compositions comprising an effector protein and an engineered guide nucleic acid, wherein the amino acid sequence of the effector protein, other than a K261R amino acid alteration, is at least 75%, at least 80%, at least 85%, at least 90%, at least 95%, at least 98%, at least 99% or 100% identical to SEQ ID NO: 262.

[0129] Also provided herein, are compositions comprising an effector protein and an engineered guide nucleic acid, wherein the amino acid sequence of the effector protein, other than a V263R amino acid alteration, is at least 75%, at least 80%, at least 85%, at least 90%, at least 95%, at least 98%, at least 99% or 100% identical to SEQ ID NO: 263.

[0130] Also provided herein, are compositions comprising an effector protein and an engineered guide nucleic acid, wherein the amino acid sequence of the effector protein, other than a V264R amino acid alteration, is at least 75%, at least 80%, at least 85%, at least 90%, at least 95%, at least 98%, at least 99% or 100% identical to SEQ ID NO: 264.

[0131] Also provided herein, are compositions comprising an effector protein and an engineered guide nucleic acid, wherein the amino acid sequence of the effector protein, other than a G265R amino acid alteration, is at least 75%, at least 80%, at least 85%, at least 90%, at least 95%, at least 98%, at least 99% or 100% identical to SEQ ID NO: 265.

[0132] Also provided herein, are compositions comprising an effector protein and an engineered guide nucleic acid, wherein the amino acid sequence of the effector protein, other than a V266R amino acid alteration, is at least 75%, at least 80%, at least 85%, at least 90%, at least 95%, at least 98%, at least 99% or 100% identical to SEQ ID NO: 266.

[0133] Also provided herein, are compositions comprising an effector protein and an engineered guide nucleic acid, wherein the amino acid sequence of the effector protein, other than a D267R amino acid alteration, is at least 75%, at least 80%, at least 85%, at least 90%, at least 95%, at least 98%, at least 99% or 100% identical to SEQ ID NO: 267.

[0134] Also provided herein, are compositions comprising an effector protein and an engineered guide nucleic acid, wherein the amino acid sequence of the effector protein, other than a L268R amino acid alteration, is at least 75%, at least 80%, at least 85%, at least 90%, at least 95%, at least 98%, at least 99% or 100% identical to SEQ ID NO: 268.

[0135] Also provided herein, are compositions comprising an effector protein and an engineered guide nucleic acid, wherein the amino acid sequence of the effector protein, other than a G269R amino acid alteration, is at least 75%, at least 80%, at least 85%, at least 90%, at least 95%, at least 98%, at least 99% or 100% identical to SEQ ID NO: 269.

[0136] Also provided herein, are compositions comprising an effector protein and an engineered guide nucleic acid, wherein the amino acid sequence of the effector protein, other than a 1270R amino acid alteration, is at least 75%, at least 80%, at least 85%, at least 90%, at least 95%, at least 98%, at least 99% or 100% identical to SEQ ID NO: 270.

[0137] Also provided herein, are compositions comprising an effector protein and an engineered guide nucleic acid, wherein the amino acid sequence of the effector protein, other than a N271R amino acid alteration, is at least 75%, at least 80%, at least 85%, at least 90%, at least 95%, at least 98%, at least 99% or 100% identical to SEQ ID NO: 271.

[0138] Also provided herein, are compositions comprising an effector protein and an engineered guide nucleic acid, wherein the amino acid sequence of the effector protein, other than a V272R amino acid alteration, is at least 75%, at least 80%, at least 85%, at least 90%, at least 95%, at least 98%, at least 99% or 100% identical to SEQ ID NO: 272.

[0139] Also provided herein, are compositions comprising an effector protein and an engineered guide nucleic acid, wherein the amino acid sequence of the effector protein, other than a P273R amino acid alteration, is at least 75%, at least 80%, at least 85%, at least 90%, at least 95%, at least 98%, at least 99% or 100% identical to SEQ ID NO: 273.

[0140] Also provided herein, are compositions comprising an effector protein and an engineered guide nucleic acid, wherein the amino acid sequence of the effector protein, other than a A274R amino acid alteration, is at least 75%, at least 80%, at least 85%, at least 90%, at least 95%, at least 98%, at least 99% or 100% identical to SEQ ID NO: 274.

[0141] Also provided herein, are compositions comprising an effector protein and an engineered guide nucleic acid, wherein the amino acid sequence of the effector protein, other than a Y275R amino acid alteration, is at least 75%, at least 80%, at least 85%, at least 90%, at least 95%, at least 98%, at least 99% or 100% identical to SEQ ID NO: 275.

[0142] Also provided herein, are compositions comprising an effector protein and an engineered guide nucleic acid, wherein the amino acid sequence of the effector protein, other than a V276R amino acid alteration, is at least 75%, at least 80%, at least 85%, at least 90%, at least 95%, at least 98%, at least 99% or 100% identical to SEQ ID NO: 276.

[0143] Also provided herein, are compositions comprising an effector protein and an engineered guide nucleic acid, wherein the amino acid sequence of the effector protein, other than a A277R amino acid alteration, is at least 75%, at least 80%, at least 85%, at least 90%, at least 95%, at least 98%, at least 99% or 100% identical to SEQ ID NO: 277.

[0144] Also provided herein, are compositions comprising an effector protein and an engineered guide nucleic acid, wherein the amino acid sequence of the effector protein, other than a T278R amino acid alteration, is at least 75%, at least 80%, at least 85%, at least 90%, at least 95%, at least 98%, at least 99% or 100% identical to SEQ ID NO: 278.

[0145] Also provided herein, are compositions comprising an effector protein and an engineered guide nucleic acid, wherein the amino acid sequence of the effector protein, other than a N279R amino acid alteration, is at least 75%, at least 80%, at least 85%, at least 90%, at least 95%, at least 98%, at least 99% or 100% identical to SEQ ID NO: 279.

[0146] Also provided herein, are compositions comprising an effector protein and an engineered guide nucleic acid, wherein the amino acid sequence of the effector protein, other than a 1280R amino acid alteration, is at least 75%, at least 80%, at least 85%, at least 90%, at least 95%, at least 98%, at least 99% or 100% identical to SEQ ID NO: 280.

[0147] Also provided herein, are compositions comprising an effector protein and an engineered guide nucleic acid, wherein the amino acid sequence of the effector protein, other than a T281R amino acid alteration, is at least 75%, at least 80%, at least 85%, at least 90%, at least 95%, at least 98%, at least 99% or 100% identical to SEQ ID NO: 281.

[0148] Also provided herein, are compositions comprising an effector protein and an engineered guide nucleic acid, wherein the amino acid sequence of the effector protein, other than a E282R amino acid alteration, is at least 75%, at least 80%, at least 85%, at least 90%, at least 95%, at least 98%, at least 99% or 100% identical to SEQ ID NO: 282.

[0149] Also provided herein, are compositions comprising an effector protein and an engineered guide nucleic acid, wherein the amino acid sequence of the effector protein, other than a I457R amino acid alteration, is at least 75%, at least 80%, at least 85%, at least 90%, at least 95%, at least 98%, at least 99% or 100% identical to SEQ ID NO: 283.

[0150] Also provided herein, are compositions comprising an effector protein and an engineered guide nucleic acid, wherein the amino acid sequence of the effector protein, other than a A458R amino acid alteration, is at least 75%, at least 80%, at least 85%, at least 90%, at least 95%, at least 98%, at least 99% or 100% identical to SEQ ID NO: 284.

[0151] Also provided herein, are compositions comprising an effector protein and an engineered guide nucleic acid, wherein the amino acid sequence of the effector protein, other than a N459R amino acid alteration, is at least 75%, at least 80%, at least 85%, at least 90%, at least 95%, at least 98%, at least 99% or 100% identical to SEQ ID NO: 285.

[0152] Also provided herein, are compositions comprising an effector protein and an engineered guide nucleic acid, wherein the amino acid sequence of the effector protein, other than a 5460R amino acid alteration, is at least 75%, at least 80%, at least 85%, at least 90%, at least 95%, at least 98%, at least 99% or 100% identical to SEQ ID NO: 286.

[0153] Also provided herein, are compositions comprising an effector protein and an engineered guide nucleic acid, wherein the amino acid sequence of the effector protein, other than a K461R amino acid alteration, is at least 75%, at least 80%, at least 85%, at least 90%, at least 95%, at least 98%, at least 99% or 100% identical to SEQ ID NO: 287.

[0154] Also provided herein, are compositions comprising an effector protein and an engineered guide nucleic acid, wherein the amino acid sequence of the effector protein, other than a D462R amino acid alteration, is at least 75%, at least 80%, at least 85%, at least 90%, at least 95%, at least 98%, at least 99% or 100% identical to SEQ ID NO: 288.

[0155] Also provided herein, are compositions comprising an effector protein and an engineered guide nucleic acid, wherein the amino acid sequence of the effector protein, other than a I463R amino acid alteration, is at least 75%, at least 80%, at least 85%, at least 90%, at least 95%, at least 98%, at least 99% or 100% identical to SEQ ID NO: 289.

[0156] Also provided herein, are compositions comprising an effector protein and an engineered guide nucleic acid, wherein the amino acid sequence of the effector protein, other than a I464R amino acid alteration, is at least 75%, at least 80%, at least 85%, at least 90%, at least 95%, at least 98%, at least 99% or 100% identical to SEQ ID NO: 290.

[0157] Also provided herein, are compositions comprising an effector protein and an engineered guide nucleic acid, wherein the amino acid sequence of the effector protein, other than a K466R amino acid alteration, is at least 75%, at least 80%, at least 85%, at least 90%, at least 95%, at least 98%, at least 99% or 100% identical to SEQ ID NO: 291.

[0158] Also provided herein, are compositions comprising an effector protein and an engineered guide nucleic acid, wherein the amino acid sequence of the effector protein, other than a N467R amino acid alteration, is at least 75%, at least 80%, at least 85%, at least 90%, at least 95%, at least 98%, at least 99% or 100% identical to SEQ ID NO: 292.

[0159] Also provided herein, are compositions comprising an effector protein and an engineered guide nucleic acid, wherein the amino acid sequence of the effector protein, other than a E468R amino acid alteration, is at least 75%, at least 80%, at least 85%, at least 90%, at least 95%, at least 98%, at least 99% or 100% identical to SEQ ID NO: 293.

[0160] Also provided herein, are compositions comprising an effector protein and an engineered guide nucleic acid, wherein the amino acid sequence of the effector protein, other than a D267A amino acid alteration, is at least 75%, at least 80%, at least 85%, at least 90%, at least 95%, at least 98%, at least 99% or 100% identical to SEQ ID NO: 728.

[0161] Also provided herein, are compositions comprising an effector protein and an engineered guide nucleic acid, wherein the amino acid sequence of the effector protein, other than a D267A amino acid alteration, is at least 75%, at least 80%, at least 85%, at least 90%, at least 95%, at least 98%, at least 99% or 100% identical to SEQ ID NO: 729.

[0162] Also provided herein, are compositions comprising an effector protein and an engineered guide nucleic acid, wherein the amino acid sequence of the effector protein, other than a D267N amino acid alteration, is at least 75%, at least 80%, at least 85%, at least 90%, at least 95%, at least 98%, at least 99% or 100% identical to SEQ ID NO: 730.

[0163] Also provided herein, are compositions comprising an effector protein and an engineered guide nucleic acid, wherein the amino acid sequence of the effector protein, other than a E363Q amino acid alteration, is at least 75%, at least 80%, at least 85%, at least 90%, at least 95%, at least 98%, at least 99% or 100% identical to SEQ ID NO: 731.

[0164] Also provided herein, are compositions comprising an effector protein and an engineered guide nucleic acid, wherein the effector protein comprises an amino acid sequence that is at least 75%%, at least 80%, at least 85%, at least 90%, at least 95%, at least 98%, at least 99% or 100% identical to any one of SEQ ID NOs: 1-13, and wherein the engineered guide nucleic acid comprises: (i) a crRNA comprising a nucleobase sequence that is at least 75%, at least 80%, at least 85%, at least 90%, at least 95%, or 100% identical to any one of SEQ ID NOs: 46-58, (ii) a tracrRNA comprising a nucleobase sequence that is at least 75%, at least 80%, at least 85%, at least 90%, at least 95%, or 100% identical to any one of SEQ ID NOs: 91-103, or (iii) a combination thereof.

[0165] Also provided herein, are compositions comprising an effector protein and an engineered guide nucleic acid, wherein the effector protein comprises an amino acid sequence that is at least 75%%, at least 80%, at least 85%, at least 90%, at least 95%, at least 98%, at least 99% or 100% identical to any one of SEQ ID NOs: 14-21, and wherein the engineered guide nucleic acid comprises: (i) a crRNA comprising a nucleobase sequence that is at least 75%, at least 80%, at least 85%, at least 90%, at least 95%, or 100% identical to any one of SEQ ID NOs: 59-66, (ii) a tracrRNA comprising a nucleobase sequence that is at least 75%, at least 80%, at least 85%, at least 90%, at least 95%, or 100% identical to any one of SEQ ID NOs: 104-119, or (iii) a combination thereof.

[0166] Also provided herein, are compositions comprising an effector protein and an engineered guide nucleic acid, wherein the effector protein comprises an amino acid sequence that is at least 75%%, at least 80%, at least 85%, at least 90%, at least 95%, at least 98%, at least 99% or 100% identical to any one of SEQ ID NOs: 22-34, and wherein the engineered guide nucleic acid comprises: (i) a crRNA comprising a nucleobase sequence that is at least 75%, at least 80%, at least 85%, at least 90%, at least 95%, or 100% identical to any one of SEQ ID NOs: 67-79, (ii) a tracrRNA comprising a nucleobase sequence that is at least 75%, at least 80%, at least 85%, at least 90%, at least 95%, or 100% identical to any one of SEQ ID NOs: 120-127, or (iii) a combination thereof.

[0167] Also provided herein, are compositions comprising an effector protein and an engineered guide nucleic acid, wherein the effector protein comprises an amino acid sequence that is at least 75%%, at least 80%, at least 85%, at least 90%, at least 95%, at least 98%, at least 99% or 100% identical to any one of SEQ ID NOs: 35-45, and wherein the engineered guide nucleic acid comprises: (i) a crRNA comprising a nucleobase sequence that is at least 75%, at least 80%, at least 85%, at least 90%, at least 95%, or 100% identical to any one of SEQ ID NOs: 80-90, (ii) a tracrRNA comprising a nucleobase sequence that is at least 75%, at least 80%, at least 85%, at least 90%, at least 95%, or 100% identical to any one of SEQ ID NOs: 128-148, or (iii) a combination thereof.

[0168] Also provided herein, are compositions comprising an effector protein and an engineered guide nucleic acid, wherein the effector protein comprises an amino acid sequence that is at least 75%, at least 80%, at least 85%, at least 90%, at least 95%, at least 98%, at least 99% or 100% identical to SEQ ID NO: 1, wherein the engineered guide nucleic acid comprises: (i) a crRNA comprising a nucleobase sequence that is at least 75%, at least 80%, at least 85%, at least 90%, at least 95%, or 100% identical to SEQ ID NO: 46 and (ii) a tracrRNA comprising a nucleobase sequence that is at least 75%, at least 80%, at least 85%, at least 90%, at least 95%, or 100% identical to SEQ ID NO: 91.

[0169] Also provided herein, are compositions comprising an effector protein and an engineered guide nucleic acid, wherein the effector protein comprises an amino acid sequence that is at least 75%, at least 80%, at least 85%, at least 90%, at least 95%, at least 98%, at least 99% or 100% identical to SEQ ID NO: 2, wherein the engineered guide nucleic acid comprises: (i) a crRNA comprising a nucleobase sequence that is at least 75%, at least 80%, at least 85%, at least 90%, at least 95%, or 100% identical to SEQ ID NO: 47 and (ii) a tracrRNA comprising a nucleobase sequence that is at least 75%, at least 80%, at least 85%, at least 90%, at least 95%, or 100% identical to SEQ ID NO: 92.

[0170] Also provided herein, are compositions comprising an effector protein and an engineered guide nucleic acid, wherein the effector protein comprises an amino acid sequence that is at least 75%, at least 80%, at least 85%, at least 90%, at least 95%, at least 98%, at least 99% or 100% identical to SEQ ID NO: 3, wherein the engineered guide nucleic acid comprises: (i) a crRNA comprising a nucleobase sequence that is at least 75%, at least 80%, at least 85%, at least 90%, at least 95%, or 100% identical to SEQ ID NO: 48 and (ii) a tracrRNA comprising a nucleobase sequence that is at least 75%, at least 80%, at least 85%, at least 90%, at least 95%, or 100% identical to SEQ ID NO: 93.

[0171] Also provided herein, are compositions comprising an effector protein and an engineered guide nucleic acid, wherein the effector protein comprises an amino acid sequence that is at least 75%, at least 80%, at least 85%, at least 90%, at least 95%, at least 98%, at least 99% or 100% identical to SEQ ID NO: 4, wherein the engineered guide nucleic acid comprises: (i) a crRNA comprising a nucleobase sequence that is at least 75%, at least 80%, at least 85%, at least 90%, at least 95%, or 100% identical to SEQ ID NO: 49 and (ii) a tracrRNA comprising a nucleobase sequence that is at least 75%, at least 80%, at least 85%, at least 90%, at least 95%, or 100% identical to SEQ ID NO: 94.

[0172] Also provided herein, are compositions comprising an effector protein and an engineered guide nucleic acid, wherein the effector protein comprises an amino acid sequence that is at least 75%, at least 80%, at least 85%, at least 90%, at least 95%, at least 98%, at least 99%, or 100% identical to SEQ ID NO: 5, wherein the engineered guide nucleic acid comprises: (i) a crRNA comprising a nucleobase sequence that is at least 75%, at least 80%, at least 85%, at least 90%, at least 95%, or 100% identical to SEQ ID NO: 50 and (ii) a tracrRNA comprising a nucleobase sequence that is at least 75%, at least 80%, at least 85%, at least 90%, at least 95%, or 100% identical to SEQ ID NO: 95.

[0173] Also provided herein, are compositions comprising an effector protein and an engineered guide nucleic acid, wherein the effector protein comprises an amino acid sequence that is at least 75%, at least 80%, at least 85%, at least 90%, at least 95%, at least 98%, at least 99% or 100% identical to SEQ ID NO: 6, wherein the engineered guide nucleic acid comprises: (i) a crRNA comprising a nucleobase sequence that is at least 75%, at least 80%, at least 85%, at least 90%, at least 95%, or 100% identical to SEQ ID NO: 51 and (ii) a tracrRNA comprising a nucleobase sequence that is at least 75%, at least 80%, at least 85%, at least 90%, at least 95%, or 100% identical to SEQ ID NO: 96.

[0174] Also provided herein, are compositions comprising an effector protein and an engineered guide nucleic acid, wherein the effector protein comprises an amino acid sequence that is at least 75%, at least 80%, at least 85%, at least 90%, at least 95%, at least 98%, at least 99% or 100% identical to SEQ ID NO: 7, wherein the engineered guide nucleic acid comprises: (i) a crRNA comprising a nucleobase sequence that is at least 75%, at least 80%, at least 85%, at least 90%, at least 95%, or 100% identical to SEQ ID NO: 52 and (ii) a tracrRNA comprising a nucleobase sequence that is at least 75%, at least 80%, at least 85%, at least 90%, at least 95%, or 100% identical to SEQ ID NO: 97.

[0175] Also provided herein, are compositions comprising an effector protein and an engineered guide nucleic acid, wherein the effector protein comprises an amino acid sequence that is at least 75%, at least 80%, at least 85%, at least 90%, at least 95%, at least 98%, at least 99% or 100% identical to SEQ ID NO: 8, wherein the engineered guide nucleic acid comprises: (i) a crRNA comprising a nucleobase sequence that is at least 75%, at least 80%, at least 85%, at least 90%, at least 95%, or 100% identical to SEQ ID NO: 53 and (ii) a tracrRNA comprising a nucleobase sequence that is at least 75%, at least 80%, at least 85%, at least 90%, at least 95%, or 100% identical to SEQ ID NO: 98.

[0176] Also provided herein, are compositions comprising an effector protein and an engineered guide nucleic acid, wherein the effector protein comprises an amino acid sequence that is at least 75%, at least 80%, at least 85%, at least 90%, at least 95%, at least 98%, at least 99% or 100% identical to SEQ ID NO: 9, wherein the engineered guide nucleic acid comprises: (i) a crRNA comprising a nucleobase sequence that is at least 75%, at least 80%, at least 85%, at least 90%, at least 95%, or 100% identical to SEQ ID NO: 54 and (ii) a tracrRNA comprising a nucleobase sequence that is at least 75%, at least 80%, at least 85%, at least 90%, at least 95%, or 100% identical to SEQ ID NO: 99.

[0177] Also provided herein, are compositions comprising an effector protein and an engineered guide nucleic acid, wherein the effector protein comprises an amino acid sequence that is at least 75%, at least 80%, at least 85%, at least 90%, at least 95%, at least 98%, at least 99% or 100% identical to SEQ ID NO: 10, wherein the engineered guide nucleic acid comprises: (i) a crRNA comprising a nucleobase sequence that is at least 75%, at least 80%, at least 85%, at least 90%, at least 95%, or 100% identical to SEQ ID NO: 55 and (ii) a tracrRNA comprising a nucleobase sequence that is at least 75%, at least 80%, at least 85%, at least 90%, at least 95%, or 100% identical to SEQ ID NO: 100.

[0178] Also provided herein, are compositions comprising an effector protein and an engineered guide nucleic acid, wherein the effector protein comprises an amino acid sequence that is at least 75%, at least 80%, at least 85%, at least 90%, at least 95%, at least 98%, at least 99% or 100% identical to SEQ ID NO: 11, wherein the engineered guide nucleic acid comprises: (i) a crRNA comprising a nucleobase sequence that is at least 75%, at least 80%, at least 85%, at least 90%, at least 95%, or 100% identical to SEQ ID NO: 56 and (ii) a tracrRNA comprising a nucleobase sequence that is at least 75%, at least 80%, at least 85%, at least 90%, at least 95%, or 100% identical to SEQ ID NO: 101.

[0179] Also provided herein, are compositions comprising an effector protein and an engineered guide nucleic acid, wherein the effector protein comprises an amino acid sequence that is at least 75%, at least 80%, at least 85%, at least 90%, at least 95%, at least 98%, at least 99% or 100% identical to SEQ ID NO: 12, wherein the engineered guide nucleic acid comprises: (i) a crRNA comprising a nucleobase sequence that is at least 75%, at least 80%, at least 85%, at least 90%, at least 95%, or 100% identical to SEQ ID NO: 57 and (ii) a tracrRNA comprising a nucleobase sequence that is at least 75%, at least 80%, at least 85%, at least 90%, at least 95%, or 100% identical to SEQ ID NO: 102.

[0180] Also provided herein, are compositions comprising an effector protein and an engineered guide nucleic acid, wherein the effector protein comprises an amino acid sequence that is at least 75%, at least 80%, at least 85%, at least 90%, at least 95%, at least 98%, at least 99% or 100% identical to SEQ ID NO: 13, wherein the engineered guide nucleic acid comprises: (i) a crRNA comprising a nucleobase sequence that is at least 75%, at least 80%, at least 85%, at least 90%, at least 95%, or 100% identical to SEQ ID NO: 58 and (ii) a tracrRNA comprising a nucleobase sequence that is at least 75%, at least 80%, at least 85%, at least 90%, at least 95%, or 100% identical to SEQ ID NO: 103.

[0181] Also provided herein, are compositions comprising an effector protein and an engineered guide nucleic acid, wherein the effector protein comprises an amino acid sequence that is at least 75%, at least 80%, at least 85%, at least 90%, at least 95%, at least 98%, at least 99% or 100% identical to SEQ ID NO: 14, wherein the engineered guide nucleic acid comprises: (i) a crRNA comprising a nucleobase sequence that is at least 75%, at least 80%, at least 85%, at least 90%, at least 95%, or 100% identical to SEQ ID NO: 59 and (ii) a tracrRNA comprising a nucleobase sequence that is at least 75%, at least 80%, at least 85%, at least 90%, at least 95%, or 100% identical to SEQ ID NO: 104.

[0182] Also provided herein, are compositions comprising an effector protein and an engineered guide nucleic acid, wherein the effector protein comprises an amino acid sequence that is at least 75%, at least 80%, at least 85%, at least 90%, at least 95%, at least 98%, at least 99% or 100% identical to SEQ ID NO: 14, wherein the engineered guide nucleic acid comprises: (i) a crRNA comprising a nucleobase sequence that is at least 75%, at least 80%, at least 85%, at least 90%, at least 95%, or 100% identical to SEQ ID NO: 59 and (ii) a tracrRNA comprising a nucleobase sequence that is at least 75%, at least 80%, at least 85%, at least 90%, at least 95%, or 100% identical to SEQ ID NO: 105.

[0183] Also provided herein, are compositions comprising an effector protein and an engineered guide nucleic acid, wherein the effector protein comprises an amino acid sequence that is at least 75%, at least 80%, at least 85%, at least 90%, at least 95%, at least 98%, at least 99% or 100% identical to SEQ ID NO: 15, wherein the engineered guide nucleic acid comprises: (i) a crRNA comprising a nucleobase sequence that is at least 75%, at least 80%, at least 85%, at least 90%, at least 95%, or 100% identical to SEQ ID NO: 60 and (ii) a tracrRNA comprising a nucleobase sequence that is at least 75%, at least 80%, at least 85%, at least 90%, at least 95%, or 100% identical to SEQ ID NO: 106.

[0184] Also provided herein, are compositions comprising an effector protein and an engineered guide nucleic acid, wherein the effector protein comprises an amino acid sequence that is at least 75%, at least 80%, at least 85%, at least 90%, at least 95%, at least 98%, at least 99% or 100% identical to SEQ ID NO: 15, wherein the engineered guide nucleic acid comprises: (i) a crRNA comprising a nucleobase sequence that is at least 75%, at least 80%, at least 85%, at least 90%, at least 95%, or 100% identical to SEQ ID NO: 60 and (ii) a tracrRNA comprising a nucleobase sequence that is at least 75%, at least 80%, at least 85%, at least 90%, at least 95%, or 100% identical to SEQ ID NO: 107.

[0185] Also provided herein, are compositions comprising an effector protein and an engineered guide nucleic acid, wherein the effector protein comprises an amino acid sequence that is at least 75%, at least 80%, at least 85%, at least 90%, at least 95%, at least 98%, at least 99% or 100% identical to SEQ ID NO: 16, wherein the engineered guide nucleic acid comprises: (i) a crRNA comprising a nucleobase sequence that is at least 75%, at least 80%, at least 85%, at least 90%, at least 95%, or 100% identical to SEQ ID NO: 61 and (ii) a tracrRNA comprising a nucleobase sequence that is at least 75%, at least 80%, at least 85%, at least 90%, at least 95%, or 100% identical to SEQ ID NO: 108.

[0186] Also provided herein, are compositions comprising an effector protein and an engineered guide nucleic acid, wherein the effector protein comprises an amino acid sequence that is at least 75%, at least 80%, at least 85%, at least 90%, at least 95%, at least 98%, at least 99% or 100% identical to SEQ ID NO: 16, wherein the engineered guide nucleic acid comprises: (i) a crRNA comprising a nucleobase sequence that is at least 75%, at least 80%, at least 85%, at least 90%, at least 95%, or 100% identical to SEQ ID NO: 61 and (ii) a tracrRNA comprising a nucleobase sequence that is at least 75%, at least 80%, at least 85%, at least 90%, at least 95%, or 100% identical to SEQ ID NO: 109.

[0187] Also provided herein, are compositions comprising an effector protein and an engineered guide nucleic acid, wherein the effector protein comprises an amino acid sequence that is at least 75%, at least 80%, at least 85%, at least 90%, at least 95%, at least 98%, at least 99% or 100% identical to SEQ ID NO: 17, wherein the engineered guide nucleic acid comprises: (i) a crRNA comprising a nucleobase sequence that is at least 75%, at least 80%, at least 85%, at least 90%, at least 95%, or 100% identical to SEQ ID NO: 62 and (ii) a tracrRNA comprising a nucleobase sequence that is at least 75%, at least 80%, at least 85%, at least 90%, at least 95%, or 100% identical to SEQ ID NO: 110.

[0188] Also provided herein, are compositions comprising an effector protein and an engineered guide nucleic acid, wherein the effector protein comprises an amino acid sequence that is at least 75%, at least 80%, at least 85%, at least 90%, at least 95%, at least 98%, at least 99% or 100% identical to SEQ ID NO: 17, wherein the engineered guide nucleic acid comprises: (i) a crRNA comprising a nucleobase sequence that is at least 75%, at least 80%, at least 85%, at least 90%, at least 95%, or 100% identical to SEQ ID NO: 62 and (ii) a tracrRNA comprising a nucleobase sequence that is at least 75%, at least 80%, at least 85%, at least 90%, at least 95%, or 100% identical to SEQ ID NO: 111.

[0189] Also provided herein, are compositions comprising an effector protein and an engineered guide nucleic acid, wherein the effector protein comprises an amino acid sequence that is at least 75%, at least 80%, at least 85%, at least 90%, at least 95%, at least 98%, at least 99% or 100% identical to SEQ ID NO: 18, wherein the engineered guide nucleic acid comprises: (i) a crRNA comprising a nucleobase sequence that is at least 75%, at least 80%, at least 85%, at least 90%, at least 95%, or 100% identical to SEQ ID NO: 63 and (ii) a tracrRNA comprising a nucleobase sequence that is at least 75%, at least 80%, at least 85%, at least 90%, at least 95%, or 100% identical to SEQ ID NO: 112.

[0190] Also provided herein, are compositions comprising an effector protein and an engineered guide nucleic acid, wherein the effector protein comprises an amino acid sequence that is at least 75%, at least 80%, at least 85%, at least 90%, at least 95%, at least 98%, at least 99% or 100% identical to SEQ ID NO: 18, wherein the engineered guide nucleic acid comprises: (i) a crRNA comprising a nucleobase sequence that is at least 75%, at least 80%, at least 85%, at least 90%, at least 95%, or 100% identical to SEQ ID NO: 63 and (ii) a tracrRNA comprising a nucleobase sequence that is at least 75%, at least 80%, at least 85%, at least 90%, at least 95%, or 100% identical to SEQ ID NO: 113.

[0191] Also provided herein, are compositions comprising an effector protein and an engineered guide nucleic acid, wherein the effector protein comprises an amino acid sequence that is at least 75%, at least 80%, at least 85%, at least 90%, at least 95%, at least 98%, at least 99% or 100% identical to SEQ ID NO: 19, wherein the engineered guide nucleic acid comprises: (i) a crRNA comprising a nucleobase sequence that is at least 75%, at least 80%, at least 85%, at least 90%, at least 95%, or 100% identical to SEQ ID NO: 64 and (ii) a tracrRNA comprising a nucleobase sequence that is at least 75%, at least 80%, at least 85%, at least 90%, at least 95%, or 100% identical to SEQ ID NO: 114.

[0192] Also provided herein, are compositions comprising an effector protein and an engineered guide nucleic acid, wherein the effector protein comprises an amino acid sequence that is at least 75%, at least 80%, at least 85%, at least 90%, at least 95%, at least 98%, at least 99% or 100% identical to SEQ ID NO: 19, wherein the engineered guide nucleic acid comprises: (i) a crRNA comprising a nucleobase sequence that is at least 75%, at least 80%, at least 85%, at least 90%, at least 95%, or 100% identical to SEQ ID NO: 64 and (ii) a tracrRNA comprising a nucleobase sequence that is at least 75%, at least 80%, at least 85%, at least 90%, at least 95%, or 100% identical to SEQ ID NO: 115.

[0193] Also provided herein, are compositions comprising an effector protein and an engineered guide nucleic acid, wherein the effector protein comprises an amino acid sequence that is at least 75%, at least 80%, at least 85%, at least 90%, at least 95%, at least 98%, at least 99% or 100% identical to SEQ ID NO: 20, wherein the engineered guide nucleic acid comprises: (i) a crRNA comprising a nucleobase sequence that is at least 75%, at least 80%, at least 85%, at least 90%, at least 95%, or 100% identical to SEQ ID NO: 65 and (ii) a tracrRNA comprising a nucleobase sequence that is at least 75%, at least 80%, at least 85%, at least 90%, at least 95%, or 100% identical to SEQ ID NO: 116.

[0194] Also provided herein, are compositions comprising an effector protein and an engineered guide nucleic acid, wherein the effector protein comprises an amino acid sequence that is at least 75%, at least 80%, at least 85%, at least 90%, at least 95%, at least 98%, at least 99% or 100% identical to SEQ ID NO: 20, wherein the engineered guide nucleic acid comprises: (i) a crRNA comprising a nucleobase sequence that is at least 75%, at least 80%, at least 85%, at least 90%, at least 95%, or 100% identical to SEQ ID NO: 65 and (ii) a tracrRNA comprising a nucleobase sequence that is at least 75%, at least 80%, at least 85%, at least 90%, at least 95%, or 100% identical to SEQ ID NO: 117.

[0195] Also provided herein, are compositions comprising an effector protein and an engineered guide nucleic acid, wherein the effector protein comprises an amino acid sequence that is at least 75%, at least 80%, at least 85%, at least 90%, at least 95%, at least 98%, at least 99% or 100% identical to SEQ ID NO: 21, wherein the engineered guide nucleic acid comprises: (i) a crRNA comprising a nucleobase sequence that is at least 75%, at least 80%, at least 85%, at least 90%, at least 95%, or 100% identical to SEQ ID NO: 66 and (ii) a tracrRNA comprising a nucleobase sequence that is at least 75%, at least 80%, at least 85%, at least 90%, at least 95%, or 100% identical to SEQ ID NO: 118.

[0196] Also provided herein, are compositions comprising an effector protein and an engineered guide nucleic acid, wherein the effector protein comprises an amino acid sequence that is at least 75%, at least 80%, at least 85%, at least 90%, at least 95%, at least 98%, at least 99% or 100% identical to SEQ ID NO: 21, wherein the engineered guide nucleic acid comprises: (i) a crRNA comprising a nucleobase sequence that is at least 75%, at least 80%, at least 85%, at least 90%, at least 95%, or 100% identical to SEQ ID NO: 66 and (ii) a tracrRNA comprising a nucleobase sequence that is at least 75%, at least 80%, at least 85%, at least 90%, at least 95%, or 100% identical to SEQ ID NO: 119.

[0197] Also provided herein, are compositions comprising an effector protein and an engineered guide nucleic acid, wherein the effector protein comprises an amino acid sequence that is at least 75%, at least 80%, at least 85%, at least 90%, at least 95%, at least 98%, at least 99% or 100% identical to SEQ ID NO: 22, wherein the engineered guide nucleic acid comprises: (i) a crRNA comprising a nucleobase sequence that is at least 75%, at least 80%, at least 85%, at least 90%, at least 95%, or 100% identical to SEQ ID NO: 67 and (ii) a tracrRNA comprising a nucleobase sequence that is at least 75%, at least 80%, at least 85%, at least 90%, at least 95%, or 100% identical to SEQ ID NO: 120.

[0198] Also provided herein, are compositions comprising an effector protein and an engineered guide nucleic acid, wherein the effector protein comprises an amino acid sequence that is at least 75%, at least 80%, at least 85%, at least 90%, at least 95%, at least 98%, at least 99% or 100% identical to SEQ ID NO: 23, wherein the engineered guide nucleic acid comprises: (i) a crRNA comprising a nucleobase sequence that is at least 75%, at least 80%, at least 85%, at least 90%, at least 95%, at least 98%, at least 99% or 100% identical to SEQ ID NO: 68 and (ii) a tracrRNA comprising a nucleobase sequence that is at least 75%, at least 80%, at least 85%, at least 90%, at least 95%, or 100% identical to SEQ ID NO: 120.

[0199] Also provided herein, are compositions comprising an effector protein and an engineered guide nucleic acid, wherein the effector protein comprises an amino acid sequence that is at least 75%, at least 80%, at least 85%, at least 90%, at least 95%, at least 98%, at least 99% or 100% identical to SEQ ID NO: 24, wherein the engineered guide nucleic acid comprises: (i) a crRNA comprising a nucleobase sequence that is at least 75%, at least 80%, at least 85%, at least 90%, at least 95%, or 100% identical to SEQ ID NO: 69 and (ii) a tracrRNA comprising a nucleobase sequence that is at least 75%, at least 80%, at least 85%, at least 90%, at least 95%, or 100% identical to SEQ ID NO: 121.

[0200] Also provided herein, are compositions comprising an effector protein and an engineered guide nucleic acid, wherein the effector protein comprises an amino acid sequence that is at least 75%, at least 80%, at least 85%, at least 90%, at least 95%, at least 98%, at least 99% or 100% identical to SEQ ID NO: 25, wherein the engineered guide nucleic acid comprises: (i) a crRNA comprising a nucleobase sequence that is at least 75%, at least 80%, at least 85%, at least 90%, at least 95%, or 100% identical to SEQ ID NO: 70 and (ii) a tracrRNA comprising a nucleobase sequence that is at least 75%, at least 80%, at least 85%, at least 90%, at least 95%, or 100% identical to SEQ ID NO: 122.

[0201] Also provided herein, are compositions comprising an effector protein and an engineered guide nucleic acid, wherein the effector protein comprises an amino acid sequence that is at least 75%, at least 80%, at least 85%, at least 90%, at least 95%, at least 98%, at least 99% or 100% identical to SEQ ID NO: 26, wherein the engineered guide nucleic acid comprises: (i) a crRNA comprising a nucleobase sequence that is at least 75%, at least 80%, at least 85%, at least 90%, at least 95%, or 100% identical to SEQ ID NO: 71 and (ii) a tracrRNA comprising a nucleobase sequence that is at least 75%, at least 80%, at least 85%, at least 90%, at least 95%, or 100% identical to SEQ ID NO: 120.

[0202] Also provided herein, are compositions comprising an effector protein and an engineered guide nucleic acid, wherein the effector protein comprises an amino acid sequence that is at least 75%, at least 80%, at least 85%, at least 90%, at least 95%, at least 98%, at least 99% or 100% identical to SEQ ID NO: 27, wherein the engineered guide nucleic acid comprises: (i) a crRNA comprising a nucleobase sequence that is at least 75%, at least 80%, at least 85%, at least 90%, at least 95%, or 100% identical to SEQ ID NO: 72 and (ii) a tracrRNA comprising a nucleobase sequence that is at least 75%, at least 80%, at least 85%, at least 90%, at least 95%, or 100% identical to SEQ ID NO: 123.

[0203] Also provided herein, are compositions comprising an effector protein and an engineered guide nucleic acid, wherein the effector protein comprises an amino acid sequence that is at least 75%, at least 80%, at least 85%, at least 90%, at least 95%, at least 98%, at least 99% or 100% identical to SEQ ID NO: 28, wherein the engineered guide nucleic acid comprises: (i) a crRNA comprising a nucleobase sequence that is at least 75%, at least 80%, at least 85%, at least 90%, at least 95%, or 100% identical to SEQ ID NO: 73 and (ii) a tracrRNA comprising a nucleobase sequence that is at least 75%, at least 80%, at least 85%, at least 90%, at least 95%, or 100% identical to SEQ ID NO: 121.

[0204] Also provided herein, are compositions comprising an effector protein and an engineered guide nucleic acid, wherein the effector protein comprises an amino acid sequence that is at least 75%, at least 80%, at least 85%, at least 90%, at least 95%, at least 98%, at least 99% or 100% identical to SEQ ID NO: 22, wherein the engineered guide nucleic acid comprises: (i) a crRNA comprising a nucleobase sequence that is at least 75%, at least 80%, at least 85%, at least 90%, at least 95%, or 100% identical to SEQ ID NO: 74 and (ii) a tracrRNA comprising a nucleobase sequence that is at least 75%, at least 80%, at least 85%, at least 90%, at least 95%, or 100% identical to SEQ ID NO: 121.

[0205] Also provided herein, are compositions comprising an effector protein and an engineered guide nucleic acid, wherein the effector protein comprises an amino acid sequence that is at least 75%, at least 80%, at least 85%, at least 90%, at least 95%, at least 98%, at least 99% or 100% identical to SEQ ID NO: 30, wherein the engineered guide nucleic acid comprises: (i) a crRNA comprising a nucleobase sequence that is at least 75%, at least 80%, at least 85%, at least 90%, at least 95%, or 100% identical to SEQ ID NO: 75 and (ii) a tracrRNA comprising a nucleobase sequence that is at least 75%, at least 80%, at least 85%, at least 90%, at least 95%, or 100% identical to SEQ ID NO: 124.

[0206] Also provided herein, are compositions comprising an effector protein and an engineered guide nucleic acid, wherein the effector protein comprises an amino acid sequence that is at least 75%, at least 80%, at least 85%, at least 90%, at least 95%, at least 98%, at least 99% or 100% identical to SEQ ID NO: 31, wherein the engineered guide nucleic acid comprises: (i) a crRNA comprising a nucleobase sequence that is at least 75%, at least 80%, at least 85%, at least 90%, at least 95%, or 100% identical to SEQ ID NO: 76 and (ii) a tracrRNA comprising a nucleobase sequence that is at least 75%, at least 80%, at least 85%, at least 90%, at least 95%, or 100% identical to SEQ ID NO: 122.

[0207] Also provided herein, are compositions comprising an effector protein and an engineered guide nucleic acid, wherein the effector protein comprises an amino acid sequence that is at least 75%, at least 80%, at least 85%, at least 90%, at least 95%, at least 98%, at least 99% or 100% identical to SEQ ID NO: 32, wherein the engineered guide nucleic acid comprises: (i) a crRNA comprising a nucleobase sequence that is at least 75%, at least 80%, at least 85%, at least 90%, at least 95%, or 100% identical to SEQ ID NO: 77 and (ii) a tracrRNA comprising a nucleobase sequence that is at least 75%, at least 80%, at least 85%, at least 90%, at least 95%, or 100% identical to SEQ ID NO: 124.

[0208] Also provided herein, are compositions comprising an effector protein and an engineered guide nucleic acid, wherein the effector protein comprises an amino acid sequence that is at least 75%, at least 80%, at least 85%, at least 90%, at least 95%, at least 98%, at least 99% or 100% identical to SEQ ID NO: 33, wherein the engineered guide nucleic acid comprises: (i) a crRNA comprising a nucleobase sequence that is at least 75%, at least 80%, at least 85%, at least 90%, at least 95%, or 100% identical to SEQ ID NO: 78 and (ii) a tracrRNA comprising a nucleobase sequence that is at least 75%, at least 80%, at least 85%, at least 90%, at least 95%, or 100% identical to SEQ ID NO: 125.

[0209] Also provided herein, are compositions comprising an effector protein and an engineered guide nucleic acid, wherein the effector protein comprises an amino acid sequence that is at least 75%, at least 80%, at least 85%, at least 90%, at least 95%, at least 98%, at least 99% or 100% identical to SEQ ID NO: 33, wherein the engineered guide nucleic acid comprises: (i) a crRNA comprising a nucleobase sequence that is at least 75%, at least 80%, at least 85%, at least 90%, at least 95%, or 100% identical to SEQ ID NO: 78 and (ii) a tracrRNA comprising a nucleobase sequence that is at least 75%, at least 80%, at least 85%, at least 90%, at least 95%, or 100% identical to SEQ ID NO: 126.

[0210] Also provided herein, are compositions comprising an effector protein and an engineered guide nucleic acid, wherein the effector protein comprises an amino acid sequence that is at least 75%, at least 80%, at least 85%, at least 90%, at least 95%, at least 98%, at least 99% or 100% identical to SEQ ID NO: 34, wherein the engineered guide nucleic acid comprises: (i) a crRNA comprising a nucleobase sequence that is at least 75%, at least 80%, at least 85%, at least 90%, at least 95%, or 100% identical to SEQ ID NO: 79 and (ii) a tracrRNA comprising a nucleobase sequence that is at least 75%, at least 80%, at least 85%, at least 90%, at least 95%, or 100% identical to SEQ ID NO: 127.

[0211] Also provided herein, are compositions comprising an effector protein and an engineered guide nucleic acid, wherein the effector protein comprises an amino acid sequence that is at least 75%, at least 80%, at least 85%, at least 90%, at least 95%, at least 98%, at least 99% or 100% identical to SEQ ID NO: 35, wherein the engineered guide nucleic acid comprises: (i) a crRNA comprising a nucleobase sequence that is at least 75%, at least 80%, at least 85%, at least 90%, at least 95%, or 100% identical to SEQ ID NO: 80 and (ii) a tracrRNA comprising a nucleobase sequence that is at least 75%, at least 80%, at least 85%, at least 90%, at least 95%, or 100% identical to SEQ ID NO: 128.

[0212] Also provided herein, are compositions comprising an effector protein and an engineered guide nucleic acid, wherein the effector protein comprises an amino acid sequence that is at least 75%, at least 80%, at least 85%, at least 90%, at least 95%, at least 98%, at least 99% or 100% identical to SEQ ID NO: 35, wherein the engineered guide nucleic acid comprises: (i) a crRNA comprising a nucleobase sequence that is at least 75%, at least 80%, at least 85%, at least 90%, at least 95%, or 100% identical to SEQ ID NO: 80 and (ii) a tracrRNA comprising a nucleobase sequence that is at least 75%, at least 80%, at least 85%, at least 90%, at least 95%, or 100% identical to SEQ ID NO: 129.

[0213] Also provided herein, are compositions comprising an effector protein and an engineered guide nucleic acid, wherein the effector protein comprises an amino acid sequence that is at least 75%, at least 80%, at least 85%, at least 90%, at least 95%, at least 98%, at least 99% or 100% identical to SEQ ID NO: 36, wherein the engineered guide nucleic acid comprises: (i) a crRNA comprising a nucleobase sequence that is at least 75%, at least 80%, at least 85%, at least 90%, at least 95%, or 100% identical to SEQ ID NO: 81 and (ii) a tracrRNA comprising a nucleobase sequence that is at least 75%, at least 80%, at least 85%, at least 90%, at least 95%, or 100% identical to SEQ ID NO: 130.

[0214] Also provided herein, are compositions comprising an effector protein and an engineered guide nucleic acid, wherein the effector protein comprises an amino acid sequence that is at least 75%, at least 80%, at least 85%, at least 90%, at least 95%, at least 98%, at least 99% or 100% identical to SEQ ID NO: 36, wherein the engineered guide nucleic acid comprises: (i) a crRNA comprising a nucleobase sequence that is at least 75%, at least 80%, at least 85%, at least 90%, at least 95%, or 100% identical to SEQ ID NO: 81 and (ii) a tracrRNA comprising a nucleobase sequence that is at least 75%, at least 80%, at least 85%, at least 90%, at least 95%, or 100% identical to SEQ ID NO: 131.

[0215] Also provided herein, are compositions comprising an effector protein and an engineered guide nucleic acid, wherein the effector protein comprises an amino acid sequence that is at least 75%, at least 80%, at least 85%, at least 90%, at least 95%, at least 98%, at least 99% or 100% identical to SEQ ID NO: 37, wherein the engineered guide nucleic acid comprises: (i) a crRNA comprising a nucleobase sequence that is at least 75%, at least 80%, at least 85%, at least 90%, at least 95%, or 100% identical to SEQ ID NO: 82 and (ii) a tracrRNA comprising a nucleobase sequence that is at least 75%, at least 80%, at least 85%, at least 90%, at least 95%, or 100% identical to SEQ ID NO: 132.

[0216] Also provided herein, are compositions comprising an effector protein and an engineered guide nucleic acid, wherein the effector protein comprises an amino acid sequence that is at least 75%, at least 80%, at least 85%, at least 90%, at least 95%, at least 98%, at least 99% or 100% identical to SEQ ID NO: 37, wherein the engineered guide nucleic acid comprises: (i) a crRNA comprising a nucleobase sequence that is at least 75%, at least 80%, at least 85%, at least 90%, at least 95%, or 100% identical to SEQ ID NO: 82 and (ii) a tracrRNA comprising a nucleobase sequence that is at least 75%, at least 80%, at least 85%, at least 90%, at least 95%, or 100% identical to SEQ ID NO: 133.

[0217] Also provided herein, are compositions comprising an effector protein and an engineered guide nucleic acid, wherein the effector protein comprises an amino acid sequence that is at least 75%, at least 80%, at least 85%, at least 90%, at least 95%, at least 98%, at least 99% or 100% identical to SEQ ID NO: 38, wherein the engineered guide nucleic acid comprises: (i) a crRNA comprising a nucleobase sequence that is at least 75%, at least 80%, at least 85%, at least 90%, at least 95%, or 100% identical to SEQ ID NO: 83 and (ii) a tracrRNA comprising a nucleobase sequence that is at least 75%, at least 80%, at least 85%, at least 90%, at least 95%, or 100% identical to SEQ ID NO: 134.

[0218] Also provided herein, are compositions comprising an effector protein and an engineered guide nucleic acid, wherein the effector protein comprises an amino acid sequence that is at least 75%, at least 80%, at least 85%, at least 90%, at least 95%, at least 98%, at least 99% or 100% identical to SEQ ID NO: 38, wherein the engineered guide nucleic acid comprises: (i) a crRNA comprising a nucleobase sequence that is at least 75%, at least 80%, at least 85%, at least 90%, at least 95%, or 100% identical to SEQ ID NO: 83 and (ii) a tracrRNA comprising a nucleobase sequence that is at least 75%, at least 80%, at least 85%, at least 90%, at least 95%, or 100% identical to SEQ ID NO: 135.

[0219] Also provided herein, are compositions comprising an effector protein and an engineered guide nucleic acid, wherein the effector protein comprises an amino acid sequence that is at least 75%, at least 80%, at least 85%, at least 90%, at least 95%, at least 98%, at least 99% or 100% identical to SEQ ID NO: 39, wherein the engineered guide nucleic acid comprises: (i) a crRNA comprising a nucleobase sequence that is at least 75%, at least 80%, at least 85%, at least 90%, at least 95%, or 100% identical to SEQ ID NO: 84 and (ii) a tracrRNA comprising a nucleobase sequence that is at least 75%, at least 80%, at least 85%, at least 90%, at least 95%, or 100% identical to SEQ ID NO: 136.

[0220] Also provided herein, are compositions comprising an effector protein and an engineered guide nucleic acid, wherein the effector protein comprises an amino acid sequence that is at least 75%, at least 80%, at least 85%, at least 90%, at least 95%, at least 98%, at least 99% or 100% identical to SEQ ID NO: 39, wherein the engineered guide nucleic acid comprises: (i) a crRNA comprising a nucleobase sequence that is at least 75%, at least 80%, at least 85%, at least 90%, at least 95%, or 100% identical to SEQ ID NO: 84 and (ii) a tracrRNA comprising a nucleobase sequence that is at least 75%, at least 80%, at least 85%, at least 90%, at least 95%, or 100% identical to SEQ ID NO: 137.

[0221] Also provided herein, are compositions comprising an effector protein and an engineered guide nucleic acid, wherein the effector protein comprises an amino acid sequence that is at least 75%, at least 80%, at least 85%, at least 90%, at least 95%, at least 98%, at least 99% or 100% identical to SEQ ID NO: 40, wherein the engineered guide nucleic acid comprises: (i) a crRNA comprising a nucleobase sequence that is at least 75%, at least 80%, at least 85%, at least 90%, at least 95%, or 100% identical to SEQ ID NO: 85 and (ii) a tracrRNA comprising a nucleobase sequence that is at least 75%, at least 80%, at least 85%, at least 90%, at least 95%, or 100% identical to SEQ ID NO: 138.

[0222] Also provided herein, are compositions comprising an effector protein and an engineered guide nucleic acid, wherein the effector protein comprises an amino acid sequence that is at least 75%, at least 80%, at least 85%, at least 90%, at least 95%, at least 98%, at least 99% or 100% identical to SEQ ID NO: 41, wherein the engineered guide nucleic acid comprises: (i) a crRNA comprising a nucleobase sequence that is at least 75%, at least 80%, at least 85%, at least 90%, at least 95%, or 100% identical to SEQ ID NO: 86 and (ii) a tracrRNA comprising a nucleobase sequence that is at least 75%, at least 80%, at least 85%, at least 90%, at least 95%, or 100% identical to SEQ ID NO: 139.

[0223] Also provided herein, are compositions comprising an effector protein and an engineered guide nucleic acid, wherein the effector protein comprises an amino acid sequence that is at least 75%, at least 80%, at least 85%, at least 90%, at least 95%, at least 98%, at least 99% or 100% identical to SEQ ID NO: 41, wherein the engineered guide nucleic acid comprises: (i) a crRNA comprising a nucleobase sequence that is at least 75%, at least 80%, at least 85%, at least 90%, at least 95%, or 100% identical to SEQ ID NO: 86 and (ii) a tracrRNA comprising a nucleobase sequence that is at least 75%, at least 80%, at least 85%, at least 90%, at least 95%, or 100% identical to SEQ ID NO: 140.

[0224] Also provided herein, are compositions comprising an effector protein and an engineered guide nucleic acid, wherein the effector protein comprises an amino acid sequence that is at least 75%, at least 80%, at least 85%, at least 90%, at least 95%, at least 98%, at least 99% or 100% identical to SEQ ID NO: 42, wherein the engineered guide nucleic acid comprises: (i) a crRNA comprising a nucleobase sequence that is at least 75%, at least 80%, at least 85%, at least 90%, at least 95%, or 100% identical to SEQ ID NO: 87 and (ii) a tracrRNA comprising a nucleobase sequence that is at least 75%, at least 80%, at least 85%, at least 90%, at least 95%, or 100% identical to SEQ ID NO: 141.

[0225] Also provided herein, are compositions comprising an effector protein and an engineered guide nucleic acid, wherein the effector protein comprises an amino acid sequence that is at least 75%, at least 80%, at least 85%, at least 90%, at least 95%, at least 98%, at least 99% or 100% identical to SEQ ID NO: 42, wherein the engineered guide nucleic acid comprises: (i) a crRNA comprising a nucleobase sequence that is at least 75%, at least 80%, at least 85%, at least 90%, at least 95%, or 100% identical to SEQ ID NO: 87 and (ii) a tracrRNA comprising a nucleobase sequence that is at least 75%, at least 80%, at least 85%, at least 90%, at least 95%, or 100% identical to SEQ ID NO: 142.

[0226] Also provided herein, are compositions comprising an effector protein and an engineered guide nucleic acid, wherein the effector protein comprises an amino acid sequence that is at least 75%, at least 80%, at least 85%, at least 90%, at least 95%, at least 98%, at least 99% or 100% identical to SEQ ID NO: 43, wherein the engineered guide nucleic acid comprises: (i) a crRNA comprising a nucleobase sequence that is at least 75%, at least 80%, at least 85%, at least 90%, at least 95%, or 100% identical to SEQ ID NO: 88 and (ii) a tracrRNA comprising a nucleobase sequence that is at least 75%, at least 80%, at least 85%, at least 90%, at least 95%, or 100% identical to SEQ ID NO: 143.

[0227] Also provided herein, are compositions comprising an effector protein and an engineered guide nucleic acid, wherein the effector protein comprises an amino acid sequence that is at least 75%, at least 80%, at least 85%, at least 90%, at least 95%, at least 98%, at least 99% or 100% identical to SEQ ID NO: 43, wherein the engineered guide nucleic acid comprises: (i) a crRNA comprising a nucleobase sequence that is at least 75%, at least 80%, at least 85%, at least 90%, at least 95%, or 100% identical to SEQ ID NO: 88 and (ii) a tracrRNA comprising a nucleobase sequence that is at least 75%, at least 80%, at least 85%, at least 90%, at least 95%, or 100% identical to SEQ ID NO: 144.

[0228] Also provided herein, are compositions comprising an effector protein and an engineered guide nucleic acid, wherein the effector protein comprises an amino acid sequence that is at least 75%, at least 80%, at least 85%, at least 90%, at least 95%, at least 98%, at least 99% or 100% identical to SEQ ID NO: 44, wherein the engineered guide nucleic acid comprises: (i) a crRNA comprising a nucleobase sequence that is at least 75%, at least 80%, at least 85%, at least 90%, at least 95%, or 100% identical to SEQ ID NO: 89 and (ii) a tracrRNA comprising a nucleobase sequence that is at least 75%, at least 80%, at least 85%, at least 90%, at least 95%, or 100% identical to SEQ ID NO: 145.

[0229] Also provided herein, are compositions comprising an effector protein and an engineered guide nucleic acid, wherein the effector protein comprises an amino acid sequence that is at least 75%, at least 80%, at least 85%, at least 90%, at least 95%, at least 98%, at least 99% or 100% identical to SEQ ID NO: 44, wherein the engineered guide nucleic acid comprises: (i) a crRNA comprising a nucleobase sequence that is at least 75%, at least 80%, at least 85%, at least 90%, at least 95%, or 100% identical to SEQ ID NO: 89 and (ii) a tracrRNA comprising a nucleobase sequence that is at least 75%, at least 80%, at least 85%, at least 90%, at least 95%, or 100% identical to SEQ ID NO: 146.

[0230] Also provided herein, are compositions comprising an effector protein and an engineered guide nucleic acid, wherein the effector protein comprises an amino acid sequence that is at least 75%, at least 80%, at least 85%, at least 90%, at least 95%, at least 98%, at least 99% or 100% identical to SEQ ID NO: 45, wherein the engineered guide nucleic acid comprises: (i) a crRNA comprising a nucleobase sequence that is at least 75%, at least 80%, at least 85%, at least 90%, at least 95%, or 100% identical to SEQ ID NO: 90 and (ii) a tracrRNA comprising a nucleobase sequence that is at least 75%, at least 80%, at least 85%, at least 90%, at least 95%, or 100% identical to SEQ ID NO: 147.

[0231] Also provided herein, are compositions comprising an effector protein and an engineered guide nucleic acid, wherein the effector protein comprises an amino acid sequence that is at least 75%, at least 80%, at least 85%, at least 90%, at least 95%, at least 98%, at least 99% or 100% identical to SEQ ID NO: 45, wherein the engineered guide nucleic acid comprises: (i) a crRNA comprising a nucleobase sequence that is at least 75%, at least 80%, at least 85%, at least 90%, at least 95%, or 100% identical to SEQ ID NO: 90 and (ii) a tracrRNA comprising a nucleobase sequence that is at least 75%, at least 80%, at least 85%, at least 90%, at least 95%, or 100% identical to SEQ ID NO: 148.

[0232] Also provided herein, are compositions comprising an effector protein and an engineered guide nucleic acid, wherein the effector protein comprises an amino acid sequence that is at least 75%, at least 80%, at least 85%, at least 90%, at least 95%, at least 98%, at least 99% or 100% identical to SEQ ID NO: 22, wherein the engineered guide nucleic acid comprises: a single guide RNA comprising a nucleobase sequence that is at least 75%, at least 80%, at least 85%, at least 90%, at least 95%, at least 98%, at least 99% or 100% identical to SEQ ID NO: 149.

[0233] Also provided herein, are compositions comprising an effector protein and an engineered guide nucleic acid, wherein the effector protein comprises an amino acid sequence that is at least 75%, at least 80%, at least 85%, at least 90%, at least 95%, at least 98%, at least 99% or 100% identical to SEQ ID NO: 23, wherein the engineered guide nucleic acid comprises: a single guide RNA comprising a nucleobase sequence that is at least 75%, at least 80%, at least 85%, at least 90%, at least 95%, at least 98%, at least 99% or 100% identical to SEQ ID NO: 149.

[0234] Also provided herein, are compositions comprising an effector protein and an engineered guide nucleic acid, wherein the effector protein comprises an amino acid sequence that is at least 75%, at least 80%, at least 85%, at least 90%, at least 95%, at least 98%, at least 99% or 100% identical to SEQ ID NO: 24, wherein the engineered guide nucleic acid comprises: a single guide RNA comprising a nucleobase sequence that is at least 75%, at least 80%, at least 85%, at least 90%, at least 95%, at least 98%, at least 99% or 100% identical to SEQ ID NO: 150.

[0235] Also provided herein, are compositions comprising an effector protein and an engineered guide nucleic acid, wherein the effector protein comprises an amino acid sequence that is at least 75%, at least 80%, at least 85%, at least 90%, at least 95%, at least 98%, at least 99% or 100% identical to SEQ ID NO: 25, wherein the engineered guide nucleic acid comprises: a single guide RNA comprising a nucleobase sequence that is at least 75%, at least 80%, at least 85%, at least 90%, at least 95%, at least 98%, at least 99% or 100% identical to SEQ ID NO: 151.

[0236] Also provided herein, are compositions comprising an effector protein and an engineered guide nucleic acid, wherein the effector protein comprises an amino acid sequence that is at least 75%, at least 80%, at least 85%, at least 90%, at least 95%, at least 98%, at least 99% or 100% identical to SEQ ID NO: 26, wherein the engineered guide nucleic acid comprises: a single guide RNA comprising a nucleobase sequence that is at least 75%, at least 80%, at least 85%, at least 90%, at least 95%, at least 98%, at least 99% or 100% identical to SEQ ID NO: 149.

[0237] Also provided herein, are compositions comprising an effector protein and an engineered guide nucleic acid, wherein the effector protein comprises an amino acid sequence that is at least 75%, at least 80%, at least 85%, at least 90%, at least 95%, at least 98%, at least 99% or 100% identical to SEQ ID NO: 28, wherein the engineered guide nucleic acid comprises: a single guide RNA comprising a nucleobase sequence that is at least 75%, at least 80%, at least 85%, at least 90%, at least 95%, at least 98%, at least 99% or 100% identical to SEQ ID NO: 150.

[0238] Also provided herein, are compositions comprising an effector protein and an engineered guide nucleic acid, wherein the effector protein comprises an amino acid sequence that is at least 75%, at least 80%, at least 85%, at least 90%, at least 95%, at least 98%, at least 99% or 100% identical to SEQ ID NO: 29, wherein the engineered guide nucleic acid comprises: a single guide RNA comprising a nucleobase sequence that is at least 75%, at least 80%, at least 85%, at least 90%, at least 95%, at least 98%, at least 99% or 100% identical to SEQ ID NO: 150.

[0239] Also provided herein, are compositions comprising an effector protein and an engineered guide nucleic acid, wherein the effector protein comprises an amino acid sequence that is at least 75%, at least 80%, at least 85%, at least 90%, at least 95%, at least 98%, at least 99% or 100% identical to SEQ ID NO: 30, wherein the engineered guide nucleic acid comprises: a single guide RNA comprising a nucleobase sequence that is at least 75%, at least 80%, at least 85%, at least 90%, at least 95%, at least 98%, at least 99% or 100% identical to SEQ ID NO: 152.

[0240] Also provided herein, are compositions comprising an effector protein and an engineered guide nucleic acid, wherein the effector protein comprises an amino acid sequence that is at least 75%, at least 80%, at least 85%, at least 90%, at least 95%, at least 98%, at least 99% or 100% identical to SEQ ID NO: 31, wherein the engineered guide nucleic acid comprises: a single guide RNA comprising a nucleobase sequence that is at least 75%, at least 80%, at least 85%, at least 90%, at least 95%, at least 98%, at least 99% or 100% identical to SEQ ID NO: 151.

[0241] Also provided herein, are compositions comprising an effector protein and an engineered guide nucleic acid, wherein the effector protein comprises an amino acid sequence that is at least 75%, at least 80%, at least 85%, at least 90%, at least 95%, at least 98%, at least 99% or 100% identical to SEQ ID NO: 32, wherein the engineered guide nucleic acid comprises: a single guide RNA comprising a nucleobase sequence that is at least 75%, at least 80%, at least 85%, at least 90%, at least 95%, at least 98%, at least 99% or 100% identical to SEQ ID NO: 152.

[0242] Also provided herein, are compositions comprising an effector protein and an engineered guide nucleic acid, wherein the effector protein comprises an amino acid sequence that is at least 75%, at least 80%, at least 85%, at least 90%, at least 95%, at least 98%, at least 99% or 100% identical to SEQ ID NO: 33, wherein the engineered guide nucleic acid comprises: a single guide RNA comprising a nucleobase sequence that is at least 75%, at least 80%, at least 85%, at least 90%, at least 95%, at least 98%, at least 99% or 100% identical to SEQ ID NO: 153.

[0243] Also provided herein, are any one of the compositions disclosed herein, wherein the crRNA and the tracrRNA are linked in a single guide RNA.

[0244] Also provided herein, are any one of the compositions disclosed herein, wherein the effector protein comprises a nuclear localization signal.

[0245] Also provided herein, are a pharmaceutical composition, comprising any one of the compositions disclosed herein and a pharmaceutically acceptable excipient.

[0246] Also provided herein, are systems comprising any one of the compositions disclosed herein. In some embodiments, the system comprises at least one detection reagent for detecting a target nucleic acid. In some embodiments, the at least one detection reagent is selected from a reporter nucleic acid, a detection moiety, an additional effector protein, or a combination thereof, optionally wherein the reporter nucleic acid comprises a fluorophore, a quencher, or a combination thereof. In some embodiments, the system further comprises at least one amplification reagent for amplifying a target nucleic acid. In some embodiments, at least one amplification reagent is selected from the group consisting of a primer, a polymerase, an activator, a dNTP, an rNTP, and combinations thereof. In some embodiments, the target nucleic acid comprises a PAM sequence selected from any one of SEQ ID NOs: 256-270. In some embodiments, the target nucleic acid comprises a PAM sequence selected from any one of SEQ ID NOs: 301-371.

[0247] Also provided herein are methods of detecting a target nucleic acid in a sample, comprising contacting the sample with any one of the compositions disclosed herein or any one of the systems disclosed herein, thereby generating a modification of the target nucleic acid; and detecting the modification. In some embodiments, the methods can comprise the steps of: (a) contacting the sample with: (i) any one of the compositions disclosed herein or any one of the systems disclosed herein; and (ii) a reporter nucleic acid comprising a detectable moiety that produces a detectable signal in the presence of the target nucleic acid and the composition or system, and (b) detecting the detectable signal. In some embodiments, the target nucleic acid comprises a PAM sequence selected from any one of SEQ ID NOs: 256-270. In some embodiments, the target nucleic acid comprises a PAM sequence selected from any one of SEQ ID NOs: 301-371.

[0248] In some embodiments, (i) the effector protein comprises an amino acid sequence that is at least 75%, at least 80%, at least 85%, at least 90%, at least 95%, at least 98%, at least 99% or 100% identical to SEQ ID NO: 1; (ii) the crRNA comprises a nucleobase sequence that is at least 75%, at least 80%, at least 85%, at least 90%, at least 95%, or 100% identical to SEQ ID NO: 46; (iii) the tracrRNA comprises a nucleobase sequence that is at least 75%, at least 80%, at least 85%, at least 90%, at least 95%, or 100% identical to SEQ ID NO: 91. In some instances, the target nucleic acid has a PAM sequence of CTT (SEQ ID NO: 154).

[0249] In some embodiments, the effector protein comprises an amino acid sequence that is at least 75%, at least 80%, at least 85%, at least 90%, at least 95%, at least 98%, at least 99% or 100% identical to SEQ ID NO: 13; (i) the crRNA comprises a nucleobase sequence that is at least 75%, at least 80%, at least 85%, at least 90%, at least 95%, or 100% identical to SEQ ID NO: 58; (ii) the tracrRNA comprises a nucleobase sequence that is at least 75%, at least 80%, at least 85%, at least 90%, at least 95%, or 100% identical to SEQ ID NO: 103; and (iii) the target nucleic acid has a PAM sequence of CTT (SEQ ID NO: 154).

[0250] In some embodiments, (i) the effector protein comprises an amino acid sequence that is at least 75%, at least 80%, at least 85%, at least 90%, at least 95%, at least 98%, at least 99% or 100% identical to SEQ ID NO: 15; (ii) the crRNA comprises a nucleobase sequence that is at least 75%, at least 80%, at least 85%, at least 90%, at least 95%, or 100% identical to SEQ ID NO: 60; (iii) the tracrRNA comprises a nucleobase sequence that is at least 75%, at least 80%, at least 85%, at least 90%, at least 95%, or 100% identical to SEQ ID NO: 106; and (iv) the target nucleic acid has a PAM sequence of CC (SEQ ID NO: 155). In some embodiments, (i) the effector protein comprises an amino acid sequence that is at least 75%, at least 80%, at least 85%, at least 90%, at least 95%, at least 98%, at least 99% or 100% identical to SEQ ID NO: 15; (ii) the crRNA comprises a nucleobase sequence that is at least 75%, at least 80%, at least 85%, at least 90%, at least 95%, or 100% identical to SEQ ID NO: 60; (iii) the tracrRNA comprises a nucleobase sequence that is at least 75%, at least 80%, at least 85%, at least 90%, at least 95%, or 100% identical to SEQ ID NO: 107; and (iv) the target nucleic acid has a PAM sequence of CC (SEQ ID NO: 155).

[0251] In some embodiments, (i) the effector protein comprises an amino acid sequence that is at least 75%, at least 80%, at least 85%, at least 90%, at least 95%, at least 98%, at least 99% or 100% identical to SEQ ID NO: 22; (ii) the crRNA comprises a nucleobase sequence that is at least 75%, at least 80%, at least 85%, at least 90%, at least 95%, or 100% identical to SEQ ID NO: 67; (iii) the tracrRNA comprises a nucleobase sequence that is at least 75%, at least 80%, at least 85%, at least 90%, at least 95%, or 100% identical to SEQ ID NO: 120; and (iv) the target nucleic acid has a PAM sequence of GCG (SEQ ID NO: 157). In some embodiments (i) the effector protein comprises an amino acid sequence that is at least 75%, at least 80%, at least 85%, at least 90%, at least 95%, at least 98%, at least 99% or 100% identical to SEQ ID NO: 22; (ii) the sgRNA comprises a nucleobase sequence that is at least 75%, at least 80%, at least 85%, at least 90%, at least 95%, at least 98%, at least 99% or 100% identical to SEQ ID NO: 149; and (iii) the target nucleic acid has a PAM sequence of TCG (SEQ ID NO: 156).

[0252] In some embodiments (i) the effector protein comprises an amino acid sequence that is at least 75%, at least 80%, at least 85%, at least 90%, at least 95%, at least 98%, at least 99% or 100% identical to SEQ ID NO: 23; (ii) the crRNA comprises a nucleobase sequence that is at least 75%, at least 80%, at least 85%, at least 90%, at least 95%, or 100% identical to SEQ ID NO: 68; (iii) the tracrRNA comprises a nucleobase sequence that is at least 75%, at least 80%, at least 85%, at least 90%, at least 95%, or 100% identical to SEQ ID NO: 120; and (iv) the target nucleic acid has a PAM sequence of TCG (SEQ ID NO: 156), TTG (SEQ ID NO: 158), GCG (SEQ ID NO: 157), or GTG (SEQ ID NO: 159). In some embodiments, (i) the effector protein comprises an amino acid sequence that is at least 75%, at least 80%, at least 85%, at least 90%, at least 95%, at least 98%, at least 99% or 100% identical to SEQ ID NO: 23; (ii) the sgRNA comprises a nucleobase sequence that is at least 75%, at least 80%, at least 85%, at least 90%, at least 95%, at least 98%, at least 99% or 100% identical to SEQ ID NO: 149; and (iii) the target nucleic acid has a PAM sequence of TCG (SEQ ID NO: 156), TTG (SEQ ID NO: 158), GCG (SEQ ID NO: 157) or GTG (SEQ ID NO: 159).

[0253] In some embodiments, (i) the effector protein comprises an amino acid sequence that is at least 75%, at least 80%, at least 85%, at least 90%, at least 95%, at least 98%, at least 99% or 100% identical to SEQ ID NO: 24; (ii) the crRNA comprises a nucleobase sequence that is at least 75%, at least 80%, at least 85%, at least 90%, at least 95%, or 100% identical to SEQ ID NO: 69; (iii) the tracrRNA comprises a nucleobase sequence that is at least 75%, at least 80%, at least 85%, at least 90%, at least 95%, or 100% identical to SEQ ID NO: 121; and (iv) the target nucleic acid has a PAM sequence of TCG (SEQ ID NO: 156). In some examples, (i) the effector protein comprises an amino acid sequence that is at least 75%, at least 80%, at least 85%, at least 90%, at least 95%, at least 98%, at least 99% or 100% identical to SEQ ID NO: 24; (ii) the sgRNA comprises a nucleobase sequence that is at least 75%, at least 80%, at least 85%, at least 90%, at least 95%, at least 98%, at least 99% or 100% identical to SEQ ID NO: 150; and (iii) the target nucleic acid has a PAM sequence of TCG (SEQ ID NO: 156).

[0254] In some embodiments, (i) the effector protein comprises an amino acid sequence that is at least 75%, at least 80%, at least 85%, at least 90%, at least 95%, at least 98%, at least 99% or 100% identical to SEQ ID NO: 25; (ii) the crRNA comprises a nucleobase sequence that is at least 75%, at least 80%, at least 85%, at least 90%, at least 95%, or 100% identical to SEQ ID NO: 70; (iii) the tracrRNA comprises a nucleobase sequence that is at least 75%, at least 80%, at least 85%, at least 90%, at least 95%, or 100% identical to SEQ ID NO: 122; and (iv) the target nucleic acid has a PAM sequence of ATTA (SEQ ID NO: 160), ATTG (SEQ ID NO: 161), GTTA (SEQ ID NO: 162), or GTTG (SEQ ID NO: 163). In some embodiments, (i) the effector protein comprises an amino acid sequence that is at least 75%, at least 80%, at least 85%, at least 90%, at least 95%, at least 98%, at least 99% or 100% identical to SEQ ID NO: 25; (ii) the sgRNA comprises a nucleobase sequence that is at least 75%, at least 80%, at least 85%, at least 90%, at least 95%, at least 98%, at least 99% or 100% identical to SEQ ID NO: 151; and (iii) the target nucleic acid has a PAM sequence of ATTA (SEQ ID NO: 160), ATTG (SEQ ID NO: 161), GTTA (SEQ ID NO: 162), or GTTG (SEQ ID NO: 163).

[0255] In some embodiments, (i) the effector protein comprises an amino acid sequence that is at least 75%, at least 80%, at least 85%, at least 90%, at least 95%, at least 98%, at least 99% or 100% identical to SEQ ID NO: 26; (ii) the sgRNA comprises a nucleobase sequence that is at least 75%, at least 80%, at least 85%, at least 90%, at least 95%, at least 98%, at least 99% or 100% identical to SEQ ID NO: 149; and (iii) the target nucleic acid has PAM sequence of TCG (SEQ ID NO: 156).

[0256] In some embodiments, (i) the effector protein comprises an amino acid sequence that is at least 75%, at least 80%, at least 85%, at least 90%, at least 95%, at least 98%, at least 99% or 100% identical to SEQ ID NO: 28; (ii) the crRNA comprises a nucleobase sequence that is at least 75%, at least 80%, at least 85%, at least 90%, at least 95%, or 100% identical to SEQ ID NO: 73; (iii) the tracrRNA comprises a nucleobase sequence that is at least 75%, at least 80%, at least 85%, at least 90%, at least 95%, or 100% identical to SEQ ID NO: 121; and (iv) the target nucleic acid has a PAM sequence of ATTA (SEQ ID NO: 160), ATTG (SEQ ID NO: 161), GTTA (SEQ ID NO: 162), or GTTG (SEQ ID NO: 163). In some embodiments, (i) the effector protein comprises an amino acid sequence that is at least 75%, at least 80%, at least 85%, at least 90%, at least 95%, at least 98%, at least 99% or 100% identical to SEQ ID NO: 28; (ii) the sgRNA comprises a nucleobase sequence that is at least 75%, at least 80%, at least 85%, at least 90%, at least 95%, at least 98%, at least 99% or 100% identical to SEQ ID NO: 150; and (iii) the target nucleic acid has a PAM sequence of ATTA (SEQ ID NO: 160), ATTG (SEQ ID NO: 161), GTTA (SEQ ID NO: 162), or GTTG (SEQ ID NO: 163).

[0257] In some embodiments, (i) the effector protein comprises an amino acid sequence that is at least 75%, at least 80%, at least 85%, at least 90%, at least 95%, at least 98%, at least 99% or 100% identical to SEQ ID NO: 31; (ii) the sgRNA comprises a nucleobase sequence that is at least 75%, at least 80%, at least 85%, at least 90%, at least 95%, at least 98%, at least 99% or 100% identical to SEQ ID NO: 151; and (iii) the target nucleic acid has a PAM sequence of ATTA (SEQ ID NO: 160), ATTG (SEQ ID NO: 161), GTTA (SEQ ID NO: 162), or GTTG (SEQ ID NO: 163).

[0258] In some embodiments, (i) the effector protein comprises an amino acid sequence that is at least 75%, at least 80%, at least 85%, at least 90%, at least 95%, at least 98%, at least 99% or 100% identical to SEQ ID NO: 32; (ii) the sgRNA comprises a nucleobase sequence that is at least 75%, at least 80%, at least 85%, at least 90%, at least 95%, at least 98%, at least 99% or 100% identical to SEQ ID NO: 152; and (iii) the target nucleic acid has a PAM sequence of TCG (SEQ ID NO: 156) or GCG (SEQ ID NO: 157).

[0259] In some embodiments, (i) the effector protein comprises an amino acid sequence that is at least 75%, at least 80%, at least 85%, at least 90%, at least 95%, at least 98%, at least 99% or 100% identical to SEQ ID NO: 21; (ii) the crRNA comprises a nucleobase sequence that is at least 75%, at least 80%, at least 85%, at least 90%, at least 95%, or 100% identical to SEQ ID NO: 66; (iii) the tracrRNA comprises a nucleobase sequence that is at least 75%, at least 80%, at least 85%, at least 90%, at least 95%, or 100% identical to SEQ ID NO: 118; and (iv) the target nucleic acid has a PAM sequence of TC (SEQ ID NO: 164).

[0260] In some embodiments, (i) the effector protein comprises an amino acid sequence that is at least 75%, at least 80%, at least 85%, at least 90%, at least 95%, at least 98%, at least 99% or 100% identical to SEQ ID NO: 29; (ii) the crRNA comprises a nucleobase sequence that is at least 75%, at least 80%, at least 85%, at least 90%, at least 95%, or 100% identical to SEQ ID NO: 74; (iii) the tracrRNA comprises a nucleobase sequence that is at least 75%, at least 80%, at least 85%, at least 90%, at least 95%, or 100% identical to SEQ ID NO: 121; and (iv) the target nucleic acid has a PAM sequence of ATTG (SEQ ID NO: 161), ACTG (SEQ ID NO: 165), GTTG (SEQ ID NO: 163), or GCTG (SEQ ID NO: 166).

[0261] In some embodiments, (i) the effector protein comprises an amino acid sequence that is at least 75%, at least 80%, at least 85%, at least 90%, at least 95%, at least 98%, at least 99% or 100% identical to SEQ ID NO: 30; (ii) the crRNA comprises a nucleobase sequence that is at least 75%, at least 80%, at least 85%, at least 90%, at least 95%, or 100% identical to SEQ ID NO: 75; (iii) the tracrRNA comprises a nucleobase sequence that is at least 75%, at least 80%, at least 85%, at least 90%, at least 95%, or 100% identical to SEQ ID NO: 124; and (iv) the target nucleic acid has a PAM sequence of TCG (SEQ ID NO: 156).

[0262] In some embodiments, (i) the effector protein comprises an amino acid sequence that is at least 75%, at least 80%, at least 85%, at least 90%, at least 95%, at least 98%, at least 99% or 100% identical to SEQ ID NO: 34; (ii) the crRNA comprises a nucleobase sequence that is at least 75%, at least 80%, at least 85%, at least 90%, at least 95%, or 100% identical to SEQ ID NO: 79; (iii) the tracrRNA comprises a nucleobase sequence that is at least 75%, at least 80%, at least 85%, at least 90%, at least 95%, or 100% identical to SEQ ID NO: 127; and (iv) the target nucleic acid has a PAM sequence of ATTA (SEQ ID NO: 160), ATTG (SEQ ID NO: 161), GTTA (SEQ ID NO: 162), or GTTG (SEQ ID NO: 163).

[0263] In some embodiments, (i) the effector protein comprises an amino acid sequence that is at least 75%, at least 80%, at least 85%, at least 90%, at least 95%, at least 98%, at least 99% or 100% identical to SEQ ID NO: 44; (ii) the crRNA comprises a nucleobase sequence that is at least 75%, at least 80%, at least 85%, at least 90%, at least 95%, or 100% identical to SEQ ID NO: 89; (iii) the tracrRNA comprises a nucleobase sequence that is at least 75%, at least 80%, at least 85%, at least 90%, at least 95%, or 100% identical to SEQ ID NO: 145; and (iv) the target nucleic acid has a PAM sequence of TTC (SEQ ID NO: 167).

[0264] In some embodiments, (i) the effector protein comprises an amino acid sequence that is at least 75%, at least 80%, at least 85%, at least 90%, at least 95%, at least 98%, at least 99% or 100% identical to SEQ ID NO: 45; (ii) the crRNA comprises a nucleobase sequence that is at least 75%, at least 80%, at least 85%, at least 90%, at least 95%, or 100% identical to SEQ ID NO: 90; (iii) the tracrRNA comprises a nucleobase sequence that is at least 75%, at least 80%, at least 85%, at least 90%, at least 95%, or 100% identical to SEQ ID NO: 147; and (iv) the target nucleic acid has a PAM sequence of TTT (SEQ ID NO: 168), or TTC (SEQ ID NO: 167). In some embodiments, (i) the effector protein comprises an amino acid sequence that is at least 75%, at least 80%, at least 85%, at least 90%, at least 95%, at least 98%, at least 99% or 100% identical to SEQ ID NO: 45; (ii) the crRNA comprises a nucleobase sequence that is at least 75%, at least 80%, at least 85%, at least 90%, at least 95%, or 100% identical to SEQ ID NO: 90; (iii) the tracrRNA comprises a nucleobase sequence that is at least 75%, at least 80%, at least 85%, at least 90%, at least 95%, or 100% identical to SEQ ID NO: 148; and (iv) the target nucleic acid has a PAM sequence of TTT (SEQ ID NO: 168), or TTC (SEQ ID NO: 167).

[0265] In some embodiments, (i) the effector protein comprises an amino acid sequence that is at least 75%, at least 80%, at least 85%, at least 90%, at least 95%, at least 98%, at least 99% or 100% identical to SEQ ID NO: 18; (ii) the crRNA comprises a nucleobase sequence that is at least 75%, at least 80%, at least 85%, at least 90%, at least 95%, or 100% identical to SEQ ID NO: 63; (iii) the tracrRNA comprises a nucleobase sequence that is at least 75%, at least 80%, at least 85%, at least 90%, at least 95%, or 100% identical to SEQ ID NO: 113; and (iv) the target nucleic acid has a PAM sequence of CC (SEQ ID NO: 155).

[0266] In some embodiments, (i) the effector protein comprises an amino acid sequence that is at least 75%, at least 80%, at least 85%, at least 90%, at least 95%, at least 98%, at least 99% or 100% identical to SEQ ID NO: 19; (ii) the crRNA comprises a nucleobase sequence that is at least 75%, at least 80%, at least 85%, at least 90%, at least 95%, or 100% identical to SEQ ID NO: 64; (iii) the tracrRNA comprises a nucleobase sequence that is at least 75%, at least 80%, at least 85%, at least 90%, at least 95%, or 100% identical to SEQ ID NO: 114; and (iv) the target nucleic acid has a PAM sequence of CC (SEQ ID NO: 155).

[0267] In some embodiments, (i) the effector protein comprises an amino acid sequence that is at least 75%, at least 80%, at least 85%, at least 90%, at least 95%, at least 98%, at least 99% or 100% identical to SEQ ID NO: 43; (ii) the crRNA comprises a nucleobase sequence that is at least 75%, at least 80%, at least 85%, at least 90%, at least 95%, or 100% identical to SEQ ID NO: 88; (iii) the tracrRNA comprises a nucleobase sequence that is at least 75%, at least 80%, at least 85%, at least 90%, at least 95%, or 100% identical to SEQ ID NO: 144; and (iv) the target nucleic acid has a PAM sequence of TTC (SEQ ID NO: 167).

[0268] In some embodiments, the reporter nucleic acid comprises a fluorophore, a quencher, or a combination thereof, and wherein the detecting comprises detecting a fluorescent signal. In some embodiments, the method further comprises reverse transcribing the target nucleic acid, amplifying the target nucleic acid, in vitro transcribing the target nucleic acid, or any combination thereof. In some embodiments, the method further comprises reverse transcribing the target nucleic acid and/or amplifying the target nucleic acid before contacting the sample with the composition. In some embodiments, the method further comprises reverse transcribing the target nucleic acid and/or amplifying the target nucleic acid after contacting the sample with the composition. In some embodiments, the amplifying comprises isothermal amplification. In some examples, the target nucleic acid is from a pathogen. In some examples, the pathogen is a virus. In some embodiments, the virus is a SARS-CoV-2 virus or a variant thereof, an influenza A virus, an influenza B virus, a human papillomavirus, a herpes simplex virus, or a combination thereof. In some embodiments, the pathogen is a bacterium. In some embodiments, the bacterium is Chlamydia trachomatis. In some embodiments, the target nucleic acid is an RNA. In some embodiments, the target nucleic acid is DNA.

[0269] Also provided herein is a method of modifying a target nucleic acid, the method comprising contacting the target nucleic acid with any one of the compositions provided herein, thereby modifying the target nucleic acid. In some embodiments, modifying the target nucleic acid comprises cleaving the target nucleic acid, deleting a nucleotide of the target nucleic acid, inserting a nucleotide into the target nucleic acid, substituting a nucleotide of the target nucleic acid with a donor nucleotide or an additional nucleotide, or any combination thereof. In some embodiments, the method further comprises contacting the target nucleic acid with a donor nucleic acid. In some embodiments, the target nucleic acid comprises a mutation associated with a disease. In some embodiments, the disease is suspected to cause, at least in part, a cancer, an inherited disorder, an ophthalmological disorder, or a combination thereof. In some embodiments, the disease is cancer, an ophthalmological disease, a neurological disorder, a blood disorder, or a metabolic disorder. In some embodiments, the neurological disorder is Duchenne muscular dystrophy, myotonic dystrophy Type 1, or cystic fibrosis. In some embodiments, the neurological disorder is a neurodegenerative disease. In some embodiments, the target nucleic acid is encoded by a gene selected from TABLE 4. In some embodiments, the gene is PCSK9. In some embodiments, the gene is B2M, TRAC, or CIITA, or NGCG_B2M, or a combination thereof. In some embodiments, the gene is IRAC, B2M, PD1, or a combination thereof. In some embodiments, the contacting occurs in vitro. In some embodiments, the contacting occurs in vivo. In some embodiments, the contacting occurs ex vivo.

[0270] Also provided herein is a method of modifying a target nucleic acid, the method comprising contacting any one of the systems disclosed herein with the target nucleic acid, thereby modifying the target nucleic acid. In some embodiments, modifying the target nucleic acid comprises cleaving the target nucleic acid, deleting a nucleotide of the target nucleic acid, inserting a nucleotide into the target nucleic acid, substituting a nucleotide of the target nucleic acid with a donor nucleotide or an additional nucleotide, or any combination thereof. In some embodiments, the method further comprises contacting the target nucleic acid with a donor nucleic acid. In some embodiments, the target nucleic acid comprises a mutation associated with a disease. In some embodiments, the disease is suspected to cause, at least in part, a cancer, an inherited disorder, an ophthalmological disorder, or a combination thereof. In some embodiments, the the disease is cancer, an ophthalmological disease, a neurological disorder, a blood disorder, or a metabolic disorder. In some embodiments, the neurological disorder is Duchenne muscular dystrophy, myotonic dystrophy Type 1, or cystic fibrosis. In some embodiments, the neurological disorder is a neurodegenerative disease. In some embodiments, the target nucleic acid is encoded by a gene selected from TABLE 4. In some embodiments, the gene is PCSK9. In some embodiments, the gene is IRAC, B2M, PD1, or a combination thereof. In some embodiments, the contacting occurs in vitro. In some embodiments, the contacting occurs in vivo. In some embodiments, the contacting occurs ex vivo.

[0271] Also provided herein is a cell comprising any one of the compositions provided herein. In some embodiments, the cell is a T cell. In some examples, the T cell is a natural killer T cell (NKT). In some embodiments, the cell is an induced pluripotent stem cell (iPSC).

[0272] Also provided herein is a cell produced by any one of the methods disclosed herein. In some embodiments, the cell is a T cell. In some examples, the T cell is a natural killer T cell (NKT). In some embodiments, the cell is an induced pluripotent stem cell (iPSC).

[0273] Also provided herein is a population of cells produced by any one of the methods disclosed herein. In some examples, the population of cells comprises T cells. In some examples, the population of cells comprises NKT cells. In some examples, the population of cells comprise iPSCs.

[0274] Also provided herein is a method of producing a protein, the method comprising, (i) contacting a cell comprising a target nucleic acid to the composition of any one of claims 1-126, thereby editing the target nucleic acid to produce a modified cell comprising a modified nucleic acid; and (ii) producing a protein from the cell that is encoded, transcriptionally affected, or translationally affected by the modified nucleic acid. In some embodiments, the method further comprises contacting the cell to a DNA donor template. In some embodiments, the cell is a cancer cell, an animal cell, an HEK293 cell, or an immune cell. In some embodiments, the cell is a Chinese hamster ovary cell. In some embodiments, the method further comprises treating a disease.

[0275] Also provided herein are methods of editing a target nucleic acid in a mammalian cell comprising contacting the mammalian cell with a composition comprising an effector protein and a guide nucleic acid, wherein the effector protein comprises an amino acid sequence that is at least 75%, at least 80%, at least 85%, at least 90%, at least 95%, at least 98%, at least 99% or 100% identical to SEQ ID NO: 23. In some embodiments, the guide nucleic acid comprises a sequence that is at least 75%, at least 80%, at least 85%, at least 90%, at least 95%, at least 98%, at least 99% or 100% identical to SEQ ID NO: 186. In some embodiments, the guide nucleic acid comprises at least about 40, at least about 50, at least about 60, or at least about 70 contiguous nucleotides that are at least 75%, at least 80%, at least 85%, at least 90%, at least 95%, at least 98%, at least 99% or 100% identical to SEQ ID NO: 186.

[0276] Also provided herein are mammalian cells or a population of mammalian cells produced by any of the methods described herein.

[0277] Also described herein are methods of editing a target nucleic acid in a mammalian cell comprising contacting the mammalian cell with a composition comprising a fusion protein, wherein the fusion protein comprises a fusion partner protein and an effector protein, wherein the effector protein comprises an amino acid sequence that is at least 75%, at least 80%, at least 85%, at least 90%, at least 95%, at least 98%, at least 99% or 100% identical to SEQ ID NO: 729. In some embodiments, the fusion partner protein comprises a base editing enzyme. In some embodiments, the base editing enzyme comprises a deaminase or an enzyme with deaminase activity. In some embodiments, the fusion partner protein is selected from the group consisting of: ABE8e, ABE8.20m, APOBEC3, and AncBE4Max. In some embodiments, the fusion partner protein comprises an amino acid sequence that is at least 75%, at least 80%, at least 85%, at least 90%, at least 95%, at least 98%, at least 99% or 100% identical to any one of SEQ ID NOs: 713, 714, 732 and 733. In some embodiments, the method further comprises contacting the mammalian cells with a guide RNA, wherein the guide RNA comprises a sequence that is at least 75%, at least 80%, at least 85%, at least 90%, at least 95%, at least 98%, at least 99% or 100% identical to any one of SEQ ID NOs: 715-727. In some embodiments, the target nucleic acid comprises B2M, TRAC, CIITA, NGCG_B2M, or any combination thereof.

[0278] Also disclosed herein are methods of modifying the expression of a target nucleic acid comprising contacting the mammalian cell with a composition comprising a fusion protein, wherein the fusion protein comprises a fusion partner protein and an effector protein, wherein the effector protein comprises an amino acid sequence that is at least 75%, at least 80%, at least 85%, at least 90%, at least 95%, at least 98%, at least 99% or 100% identical to SEQ ID NO: 728. In some embodiments, the fusion partner protein comprises a transcriptional activator. In some embodiments, the fusion partner protein comprises an amino acid sequence that is at least 75%, at least 80%, at least 85%, at least 90%, at least 95%, at least 98%, at least 99% or 100% identical to SEQ ID NO: 300. In some embodiments, the method further comprises contacting the mammalian cells with a guide RNA, wherein the guide RNA comprises a sequence that is at least 75%, at least 80%, at least 85%, at least 90%, at least 95%, at least 98%, at least 99% or 100% identical to any one of SEQ ID NOs: 647-710. In some embodiments, the target nucleic acid comprises NEUROD1, HBG1, ASCL1, LIN28A, or any combination thereof.

[0279] Also disclosed herein are methods of modifying the expression of a target nucleic acid comprising contacting the mammalian cell with a composition comprising a fusion protein, wherein the fusion protein comprises a fusion partner protein and an effector protein, wherein the effector protein comprises an amino acid sequence that is at least 75%, at least 80%, at least 85%, at least 90%, at least 95%, at least 98%, at least 99% or 100% identical to SEQ ID NO: 729. In some embodiments, the fusion partner protein comprises a transcriptional activator. In some embodiments, the fusion partner protein comprises an amino acid sequence that is at least 75%, at least 80%, at least 85%, at least 90%, at least 95%, at least 98%, at least 99% or 100% identical to SEQ ID NO: 300. In some embodiments, the method further comprises contacting the mammalian cells with a guide RNA, wherein the guide RNA comprises a sequence that is at least 75%, at least 80%, at least 85%, at least 90%, at least 95%, at least 98%, at least 99% or 100% identical to any one of SEQ ID NOs: 647-710. In some embodiments, the target nucleic acid comprises NEUROD1, HBG1, ASCL1, LIN28A, or any combination thereof.

[0280] Also disclosed herein are methods of modifying the expression of a target nucleic acid comprising contacting the mammalian cell with a composition comprising a fusion protein, wherein the fusion protein comprises a fusion partner protein and an effector protein, wherein the effector protein comprises an amino acid sequence that is at least 75%, at least 80%, at least 85%, at least 90%, at least 95%, at least 98%, at least 99% or 100% identical to SEQ ID NO: 730. In some embodiments, the fusion partner protein comprises a transcriptional activator. In some embodiments, the fusion partner protein comprises an amino acid sequence that is at least 75%, at least 80%, at least 85%, at least 90%, at least 95%, at least 98%, at least 99% or 100% identical to SEQ ID NO: 300. In some embodiments, the method further comprises contacting the mammalian cells with a guide RNA, wherein the guide RNA comprises a sequence that is at least 75%, at least 80%, at least 85%, at least 90%, at least 95%, at least 98%, at least 99% or 100% identical to any one of SEQ ID NOs: 647-710. In some embodiments, the target nucleic acid comprises NEUROD1, HBG1, ASCL1, LIN28A, or any combination thereof.

[0281] Also disclosed herein are methods of modifying the expression of a target nucleic acid comprising contacting the mammalian cell with a composition comprising a fusion protein, wherein the fusion protein comprises a fusion partner protein and an effector protein, wherein the effector protein comprises an amino acid sequence that is at least 75%, at least 80%, at least 85%, at least 90%, at least 95%, at least 98%, at least 99% or 100% identical to SEQ ID NO: 731. In some embodiments, the fusion partner protein comprises a transcriptional activator. In some embodiments, the fusion partner protein comprises an amino acid sequence that is at least 75%, at least 80%, at least 85%, at least 90%, at least 95%, at least 98%, at least 99% or 100% identical to SEQ ID NO: 300. In some embodiments, the method further comprises contacting the mammalian cells with a guide RNA, wherein the guide RNA comprises a sequence that is at least 75%, at least 80%, at least 85%, at least 90%, at least 95%, at least 98%, at least 99% or 100% identical to any one of SEQ ID NOs: 647-710. In some embodiments, the target nucleic acid comprises NEUROD1, HBG1, ASCL1, LIN28A, or any combination thereof.

[0282] Also disclosed herein are compositions comprising an effector protein and an engineered guide nucleic acid, wherein the effector protein comprises an amino acid sequence that is at least 75%, at least 80%, at least 85%, at least 90%, at least 95%, at least 98%, at least 99% or 100% identical to any one of SEQ ID NOs: 1-45, 202-293, or 728-731, and wherein the engineered guide nucleic acid comprises: (i) a crRNA or sgRNA comprising a nucleobase sequence that is at least 75%, at least 80%, at least 85%, at least 90%, at least 95%, or 100% identical to any one of the crRNA or sgRNA sequences of TABLE 13, (ii) a tracrRNA comprising a nucleobase sequence that is at least 75%, at least 80%, at least 85%, at least 90%, at least 95%, or 100% identical to any one of the tracrRNA sequences of TABLE 13, or (iii) a combination thereof

[0283] Also disclosed herein are compositions comprising an effector protein and an engineered guide nucleic acid, wherein the effector protein comprises an amino acid sequence that is at least 75%, at least 80%, at least 85%, at least 90%, at least 95%, at least 98%, at least 99% or 100% identical to any one of SEQ ID NOs: 1-45, 202-293, or 728-731, and wherein the engineered guide nucleic acid comprises: (i) a crRNA or sgRNA comprising a nucleobase sequence that is at least 75%, at least 80%, at least 85%, at least 90%, at least 95%, or 100% identical to any one of the crRNA or sgRNA sequences of TABLE 14, (ii) a tracrRNA comprising a nucleobase sequence that is at least 75%, at least 80%, at least 85%, at least 90%, at least 95%, or 100% identical to any one of the tracrRNA sequences of TABLE 14, or (iii) a combination thereof

[0284] Also disclosed herein are compositions comprising an effector protein and an engineered guide nucleic acid, wherein the effector protein comprises an amino acid sequence that is at least 75%, at least 80%, at least 85%, at least 90%, at least 95%, at least 98%, at least 99% or 100% identical to any one of SEQ ID NOs: 223, 224, or 214 and wherein the engineered guide nucleic acid comprises: (i) a crRNA or sgRNA comprising a nucleobase sequence that is at least 75%, at least 80%, at least 85%, at least 90%, at least 95%, or 100% identical to any one of SEQ ID NOs: 463, 464, or 466, (ii) a tracrRNA comprising a nucleobase sequence that is at least 75%, at least 80%, at least 85%, at least 90%, at least 95%, or 100% identical to SEQ ID NO: 465, or (iii) a combination thereof.

[0285] Also disclosed herein are compositions comprising an effector protein and an engineered guide nucleic acid, wherein the effector protein comprises an amino acid sequence that is at least 75%, at least 80%, at least 85%, at least 90%, at least 95%, at least 98%, at least 99% or 100% identical to any one of SEQ ID NOs: 1-45, 202-293, or 728-731, and wherein the engineered guide nucleic acid comprises: a crRNA or sgRNA comprising a nucleobase sequence that is at least 75%, at least 80%, at least 85%, at least 90%, at least 95%, or 100% identical to SEQ ID NO: 180 or 467.

[0286] Also disclosed herein are compositions comprising an effector protein and an engineered guide nucleic acid, wherein the effector protein comprises an amino acid sequence that is at least 75%, at least 80%, at least 85%, at least 90%, at least 95%, at least 98%, at least 99% or 100% identical to any one of SEQ ID NOs: 1-45, 202-293, or 728-731, and wherein the engineered guide nucleic acid comprises: a crRNA or sgRNA comprising a nucleobase sequence that is at least 75%, at least 80%, at least 85%, at least 90%, at least 95%, or 100% identical to any one of the crRNA or sgRNA sequences of SEQ ID NOs: 468-481.

[0287] Also disclosed herein are compositions comprising an effector protein and an engineered guide nucleic acid, wherein the effector protein comprises an amino acid sequence that is at least 75%, at least 80%, at least 85%, at least 90%, at least 95%, at least 98%, at least 99% or 100% identical to SEQ ID NO: 23, and wherein the engineered guide nucleic acid comprises: a crRNA or sgRNA comprising a nucleobase sequence that is at least 75%, at least 80%, at least 85%, at least 90%, at least 95%, or 100% identical to any one of the crRNA or sgRNA sequences of TABLE 18.

[0288] Also disclosed herein are compositions comprising an effector protein and an engineered guide nucleic acid, wherein the effector protein comprises an amino acid sequence that is at least 75%, at least 80%, at least 85%, at least 90%, at least 95%, at least 98%, at least 99% or 100% identical to any one of SEQ ID NOs: 1-45, 202-293, or 728-731, and wherein the engineered guide nucleic acid comprises: a crRNA or sgRNA comprising a nucleobase sequence that is at least 75%, at least 80%, at least 85%, at least 90%, at least 95%, or 100% identical to any one of the crRNA or sgRNA sequences of TABLE 19.

[0289] Also disclosed herein are compositions comprising an effector protein and an engineered guide nucleic acid, wherein the effector protein comprises an amino acid sequence that is at least 75%, at least 80%, at least 85%, at least 90%, at least 95%, at least 98%, at least 99% or 100% identical to any one of SEQ ID NOs: 1-45, 202-293, or 728-731, and wherein the engineered guide nucleic acid comprises: (i) a crRNA or sgRNA comprising a nucleobase sequence that is at least 75%, at least 80%, at least 85%, at least 90%, at least 95%, or 100% identical to any one of the crRNA or sgRNA sequences of TABLE 20, (ii) a tracrRNA comprising a nucleobase sequence that is at least 75%, at least 80%, at least 85%, at least 90%, at least 95%, or 100% identical to any one of the tracrRNA sequences of TABLE 20, or (iii) a combination thereof.

[0290] Also disclosed herein are compositions comprising an effector protein and an engineered guide nucleic acid, wherein the effector protein comprises an amino acid sequence that is at least 75%, at least 80%, at least 85%, at least 90%, at least 95%, at least 98%, at least 99% or 100% identical to any one of SEQ ID NOs: 232, 233, 240, or 227, and wherein the engineered guide nucleic acid comprises: a crRNA or sgRNA comprising a nucleobase sequence that is at least 75%, at least 80%, at least 85%, at least 90%, at least 95%, or 100% identical to any one of SEQ ID NOs: 612-615.

[0291] Also disclosed herein are compositions comprising an effector protein and an engineered guide nucleic acid, wherein the effector protein comprises an amino acid sequence that is at least 75%, at least 80%, at least 85%, at least 90%, at least 95%, at least 98%, at least 99% or 100% identical to SEQ ID NO: 228, and wherein the engineered guide nucleic acid comprises: a sgRNA comprising a nucleobase sequence that is at least 75%, at least 80%, at least 85%, at least 90%, at least 95%, or 100% identical to SEQ ID NO: 616.

[0292] Also disclosed herein are compositions comprising an effector protein and an engineered guide nucleic acid, wherein the effector protein comprises an amino acid sequence that is at least 75%, at least 80%, at least 85%, at least 90%, at least 95%, at least 98%, at least 99% or 100% identical to any one of SEQ ID NO: 215, and wherein the engineered guide nucleic acid comprises: (i) a crRNA or sgRNA comprising a nucleobase sequence that is at least 75%, at least 80%, at least 85%, at least 90%, at least 95%, or 100% identical to any one of SEQ ID NOs: 617, 620 or 621, (ii) a tracrRNA comprising a nucleobase sequence that is at least 75%, at least 80%, at least 85%, at least 90%, at least 95%, or 100% identical to any one of SEQ ID NOs: 618-619, or (iii) a combination thereof.

[0293] Also disclosed herein are compositions comprising an effector protein and an engineered guide nucleic acid, wherein the effector protein comprises an amino acid sequence that is at least 75%, at least 80%, at least 85%, at least 90%, at least 95%, at least 98%, at least 99% or 100% identical to SEQ ID NO: 23, and wherein the engineered guide nucleic acid comprises: (i) a crRNA or sgRNA comprising a nucleobase sequence that is at least 75%, at least 80%, at least 85%, at least 90%, at least 95%, or 100% identical to any one of SEQ ID NOs: 68 and 149, (ii) a tracrRNA comprising a nucleobase sequence that is at least 75%, at least 80%, at least 85%, at least 90%, at least 95%, or 100% identical to SEQ ID NO: 120, or (iii) a combination thereof.

[0294] Also disclosed herein are compositions comprising an effector protein and an engineered guide nucleic acid, wherein the effector protein comprises an amino acid sequence that is at least 75%, at least 80%, at least 85%, at least 90%, at least 95%, at least 98%, at least 99% or 100% identical to SEQ ID NO: 23, and wherein the engineered guide nucleic acid comprises: (i) a crRNA or sgRNA comprising a nucleobase sequence that is at least 75%, at least 80%, at least 85%, at least 90%, at least 95%, or 100% identical to any one of the sgRNA sequences of TABLE 25, (ii) a tracrRNA comprising a nucleobase sequence that is at least 75%, at least 80%, at least 85%, at least 90%, at least 95%, or 100% identical to any one of the tracrRNA sequences of TABLE 25, (iii) a linker sequence comprising a nucleobase sequence that is at least 75%, at least 80%, at least 85%, at least 90%, at least 95%, or 100% identical to any one of the linker sequences of SEQ ID NO: 623, (iv) a spacer sequence comprising a nucleobase sequence that is at least 75%, at least 80%, at least 85%, at least 90%, at least 95%, or 100% identical to any one of the spacer sequences of TABLE 25, (v) a repeat sequence comprising a nucleobase sequence that is at least 75%, at least 80%, at least 85%, at least 90%, at least 95%, or 100% identical to any one of the repeat sequences of TABLE 25, or (vi) a combination thereof.

[0295] Also disclosed herein are methods of modifying a target nucleic acid in a sample, comprising contacting the sample with a composition disclosed herein thereby generating a modification of the target nucleic acid; and optionally detecting the modification. In some embodiments, the target nucleic acid comprises a PAM sequence selected from any one of the PAM sequences in TABLE 13, TABLE 14, TABLE 16, TABLE 17, TABLE 20, TABLE 21, TABLE 22, TABLE 23, or TABLE 24. In some embodiments, the target nucleic acid comprises a PAM sequence selected from any one of the PAM sequences in TABLE 13. In some embodiments, the target nucleic acid comprises a PAM sequence selected from any one of the PAM sequences in TABLE 14. In some embodiments, the target nucleic acid comprises a PAM sequence selected from SEQ ID NOs: 368-371. In some embodiments, the target nucleic acid comprises a PAM sequence selected from SEQ ID NOs: 369 and 370. In some embodiments, the target nucleic acid comprises a PAM sequence selected from SEQ ID NOs: 304, 312, 313, 315, 324, and 335. In some embodiments, the target nucleic acid comprises a PAM sequence selected from SEQ ID NOs: 301, 318, 335, 343, 360, and 365. In some embodiments, the target nucleic acid comprises a PAM sequence is SEQ ID NO: 368. In some embodiments, the target nucleic acid comprises a PAM sequence is SEQ ID NO: 343. In some embodiments, the target nucleic acid comprises a PAM sequence selected from SEQ ID NOs: 325-328

[0296] Also disclosed herein are systems for detecting or modifying a target sequence of a target nucleic acid comprising: a) a polypeptide, or a nucleic acid encoding the polypeptide; and b) an engineered guide nucleic acid, wherein the polypeptide comprises an amino acid sequence that is at least 85% identical to SEQ ID NO: 23. In some embodiments, the polypeptide comprises an amino acid sequence that is at least 90% identical to SEQ ID NO: 23. In some embodiments, the polypeptide comprises an amino acid sequence that is at least 95% identical to SEQ ID NO: 23. In some embodiments, the polypeptide comprises the sequence of SEQ ID NO: 23. In some embodiments, the engineered guide nucleic acid comprises a sequence that is at least 80% identical to a sequence selected from: SEQ ID NOS: 624, 628, 630, 634, 638, 641, 643, and 645. In some embodiments, the engineered guide nucleic acid comprises a sequence that is at least 95% identical to a sequence selected from: SEQ ID NOS: SEQ ID NOS: 624, 628, 630, 634, 638, 641, 643, and 645. In some embodiments, the polypeptide comprises a mutation that reduces an enzymatic activity of the polypeptide relative to the polypeptide that is 100% identical to SEQ ID NO: 23. In some embodiments, the polypeptide is capable of binding to the target nucleic acid but has reduced or no nuclease activity on the target nucleic acid. In some embodiments, the system comprises a fusion partner protein fused to the polypeptide. In some embodiments, the polypeptide is a nuclease that is capable of cleaving at least one strand of a target nucleic acid. In some embodiments, the system comprises at least one of a detection reagent and an amplification reagent. In some embodiments, the detection reagent is selected from: a reporter nucleic acid, a detection moiety, an additional polypeptide, and a combination thereof. In some embodiments, the one amplification reagent is selected from: a primer, a polymerase, a dNTP, an rNTP, and a combination thereof. In some embodiments, the target nucleic acid comprises a protospacer adjacent motif (PAM) selected from any one of SEQ ID NOS: 156-159, 325-328, and 369, and wherein the PAM is required for the polypeptide and engineered guide nucleic acid to detect or modify the target sequence. In some embodiments, the target nucleic acid comprises a PAM sequence of SEQ ID NO: 369. In some embodiments, the nucleic acid encoding the polypeptide is an expression vector. In some embodiments, the expression vector comprises or encodes the engineered guide nucleic acid. In some embodiments, the expression vector is an adeno-associated viral vector. In some embodiments, the nucleic acid encoding the polypeptide is a messenger RNA. In some embodiments, the system comprises a lipid or lipid nanoparticle.

[0297] Also disclosed herein are compositions comprising a polypeptide, or a nucleic acid encoding the polypeptide, and an engineered guide nucleic acid, wherein the polypeptide comprises an amino acid sequence that is at least 90% identical to SEQ ID NO: 23. In some embodiments, the polypeptide comprises an amino acid sequence that is at least 95% identical to SEQ ID NO: 23. In some embodiments, the engineered guide nucleic acid comprises a sequence that is at least 80% identical to a sequence selected from: SEQ ID NOS: 624, 628, 630, 634, 638, 641, 643, and 645. In some embodiments, the engineered guide nucleic acid comprises a sequence that is at least 95% identical to a sequence selected from: SEQ ID NOS: 624, 628, 630, 634, 638, 641, 643, and 645. In some embodiments, the polypeptide is fused to at least one nuclear localization signal. In some embodiments, the polypeptide is capable of binding to a target nucleic acid but has reduced or no nuclease activity on the target nucleic acid. In some embodiments, the composition comprises a fusion partner protein fused to the polypeptide. In some embodiments, the polypeptide is a nuclease that is capable of cleaving at least one strand of a target nucleic acid. In some embodiments, the composition further comprises a target nucleic acid, and wherein the target nucleic acid comprises a PAM sequence selected from any one of SEQ ID NOs: 156-159, 325-328, and 369. In some embodiments, the composition comprises a donor nucleic acid.

[0298] Also disclosed herein are compositions comprising an effector protein, or a nucleic acid encoding the effector protein, and an engineered guide nucleic acid, wherein the effector protein comprises an amino acid sequence that is at least 75%, at least 80%, at least 85%, at least 90%, at least 95%, at least 98%, at least 99% or 100% identical to a sequence selected from any one of SEQ ID NOs: 1-45, 202-293, and 728-731. In some embodiments, the engineered guide nucleic acid comprises a sequence selected from: ID Nos: 624, 628, 630, 634, 638, 641, 643, 645, 646, and 827-929. In some embodiments, the effector protein and engineered guide nucleic acid form a complex that recognizes a protospacer adjacent motif selected from TABLE 39. In some embodiments, the effector protein comprises an amino acid sequence that is at least 95% identical to a sequence selected from any one of SEQ ID NOs: 1-45, 202-240, and 728-731. In some embodiments, the effector protein comprises an amino acid sequence selected from SEQ ID NOS: 241-293. In some embodiments, the engineered guide nucleic acid is a single guide RNA. In some embodiments, the composition comprises a nuclear localization signal linked to the effector protein. In some embodiments, the length of the effector protein is about 380 to about 500 linked amino acids. In some embodiments, a fusion partner protein fused to the effector protein. In some embodiments, the effector protein is a nuclease that can cleave at least one strand of a target nucleic acid. In some embodiments, the effector protein is a nuclease that can cleave both strands of a double stranded target nucleic acid. In some embodiments, the composition comprises at least one of a detection reagent and an amplification reagent. In some embodiments, detection reagent is selected from: a reporter nucleic acid, a detection moiety, an additional polypeptide, and a combination thereof. In some embodiments, the one amplification reagent is selected from: a primer, a polymerase, a dNTP, an rNTP, and a combination thereof. In some embodiments, the nucleic acid encoding the effector protein is an expression vector. In some embodiments, the expression vector comprises or encodes the engineered guide nucleic acid. In some embodiments, the expression vector is an adeno-associated viral vector. In some embodiments, the nucleic acid encoding the effector protein is a messenger RNA. In some embodiments, the composition comprises a lipid or lipid nanoparticle. In some embodiments, the composition comprises a donor nucleic acid. In some embodiments, the engineered guide nucleic acid comprises a first sequence, wherein the effector protein can bind the first sequence; and a second sequence that hybridizes to a target sequence of a target nucleic acid. In some embodiments, the target sequence is a eukaryotic sequence

[0299] Also disclosed herein are compositions comprising an effector protein, or a nucleic acid encoding the effector protein, and an engineered guide nucleic acid, wherein the effector protein comprises an amino acid sequence that is at least 75%, at least 80%, at least 85%, at least 90%, at least 95%, at least 98%, at least 99% or 100% identical to SEQ ID NO 23. In some embodiments, the effector protein comprises an amino acid sequence that is at least 95% identical to SEQ ID NO: 23. In some embodiments, the effector protein comprises the sequence of SEQ ID NO: 23. In some embodiments, the engineered guide nucleic acid comprises a sequence that is at least 80% identical to a sequence selected from: SEQ ID NOS: 624, 628, 630, 634, 638, 641, 643, 645, 646, and 855-873. In some embodiments, the engineered guide nucleic acid comprises a sequence that is at least 95% identical to a sequence selected from: SEQ ID NOS: 624, 628, 630, 634, 638, 641, 643, 645, and 855-873. In some embodiments, the engineered guide nucleic acid comprises a sequence that is at least 80% identical to a sequence selected from: SEQ ID NOS: 645, 932, 857, 933, 934, 935, 936, 737, 747, 750, 761, 763, 765, 769, 773, 780, 782, or 785. In some embodiments, the engineered guide nucleic acid comprises a sequence that is at least 95% identical to a sequence selected from: SEQ ID NOS: 645, 932, 857, 933, 934, 935, 936, 737, 747, 750, 761, 763, 765, 769, 773, 780, 782, or 785. In some embodiments, the engineered guide nucleic acid comprises a sequence that is at least 80% identical to SEQ ID NO: 645. In some embodiments, the engineered guide nucleic acid comprises a sequence that is at least 95% identical to SEQ ID NO: 645. In some embodiments, the effector protein and engineered guide nucleic acid form a complex that recognizes a protospacer adjacent motif selected from: TCG, and KYG. In some embodiments, the effector protein comprises a mutation that reduces an enzymatic activity of the polypeptide relative to the polypeptide that is 100% identical to SEQ ID NO: 23. In some embodiments, the effector protein is capable of binding to the target nucleic acid but has reduced or no nuclease activity on the target nucleic acid. In some embodiments, the amino acid sequence of the effector protein comprises one or more amino acid alterations. In some embodiments, the amino acid sequence of the effector protein comprises one or more amino acid alterations in a domain selected from a REC domain and a RuvC domain. In some embodiments, the one or more amino acid alterations are selected from: A110R, T111R, E112R, M113R, S114R, T115R, Q116R, S117R, L118R, S119R, F122R, A123R, T124R, E125R, L126R, E127R, T128R, N129R, 1130R, F131R, A132R, K261R, V263R, V264R, G265R, V266R, D267R, D267A, D267N, L268R, G269R, 1270R, N271R, V272R, P273R, A274R, Y275R, V276R, A277R, T278R, N279R, 1280R, T281R, E282R, E363Q, I457R, A458R, N459R, S460R, K461R, D462R, I463R, I464R, K466R, N467R, E468R, and any combination thereof, relative to SEQ ID NO: 23. In some embodiments, the engineered guide nucleic acid is a single guide RNA. In some embodiments, the composition comprises a nuclear localization signal linked to the effector protein. In some embodiments, the length of the effector protein is about 380 to about 500 linked amino acids. In some embodiments, a fusion partner protein fused to the effector protein. In some embodiments, the effector protein is a nuclease that can cleave at least one strand of a target nucleic acid. In some embodiments, the effector protein is a nuclease that can cleave both strands of a double stranded target nucleic acid. In some embodiments, the composition comprises at least one of a detection reagent and an amplification reagent. In some embodiments, detection reagent is selected from: a reporter nucleic acid, a detection moiety, an additional polypeptide, and a combination thereof. In some embodiments, the one amplification reagent is selected from: a primer, a polymerase, a dNTP, an rNTP, and a combination thereof. In some embodiments, the nucleic acid encoding the effector protein is an expression vector. In some embodiments, the expression vector comprises or encodes the engineered guide nucleic acid. In some embodiments, the expression vector is an adeno-associated viral vector. In some embodiments, the nucleic acid encoding the effector protein is a messenger RNA. In some embodiments, the composition comprises a lipid or lipid nanoparticle. In some embodiments, the composition comprises a donor nucleic acid. In some embodiments, the engineered guide nucleic acid comprises a first sequence, wherein the effector protein can bind the first sequence; and a second sequence that hybridizes to a target sequence of a target nucleic acid. In some embodiments, the target sequence is a eukaryotic sequence.

[0300] Also disclosed herein are systems or kits comprising one or more components of any one of the compositions disclosed above, wherein the one or more components of the system are separate.

[0301] Also disclosed herein are pharmaceutical compositions, comprising the composition disclosed above and a pharmaceutically acceptable excipient.

[0302] Also disclosed herein are methods of modifying a target nucleic acid in a sample, comprising contacting the sample with a composition disclosed above or the system disclosed above, thereby generating a modification of the target nucleic acid; and optionally detecting the modification.

[0303] Also disclosed herein are methods of detecting a target nucleic acid in a sample, comprising the steps of: contacting the sample with: (i) the composition disclosed above or the system disclosed above; and (ii) a reporter nucleic acid comprising a detectable moiety that produces a detectable signal in the presence of the target nucleic acid and the composition or system, and detecting the detectable signal. In some embodiments, the method comprises contacting the target nucleic acid with a donor nucleic acid.

[0304] Also disclosed herein are cells comprising the compositions disclosed above. Also disclosed herein are cells produced by methods disclosed above. In some embodiments, the cell is a eukaryotic cell. In some embodiments, the cell is a mammalian cell. In some embodiments, the cell is a T cell, optionally wherein the T cell is a natural killer T cell (NKT). In some embodiments, the cell is an induced pluripotent stem cell (iPSC). Also disclosed herein are populations of cells.

[0305] Also disclosed herein are methods of treating or preventing a disease comprising administering to a subject in need thereof a composition, a pharmaceutical composition or a cell disclosed above.

[0306] Also disclosed herein are compositions comprising an effector protein, or a nucleic acid encoding the effector protein, and a guide nucleic acid, or a nucleic acid encoding the guide nucleic acid, wherein the effector protein comprises an amino acid sequence that is (a) at least 50%, at least 60%, at least 70%, at least 75%, at least 80%, at least 85%, at least 90%, at least 95%, at least 98%, at least 99% or 100% identical to SEQ ID NO: 23 and (b) includes an amino acid sequence selected from the group: (a) an amino acid sequence that is at least 60%, at least 70%, at least 80%, at least 90%, at least 95%, at least 98%, at least 99% or 100% identical to SEQ ID NO: 793, (b) an amino acid sequence that is at least 60%, at least 70%, at least 80%, at least 90%, at least 95%, at least 98%, at least 99% or 100% identical to SEQ ID NO: 794, (c) an amino acid sequence that is at least 60%, at least 70%, at least 80%, at least 90%, at least 95%, at least 98%, at least 99% or 100% identical to SEQ ID NO: 795, (d) an amino acid sequence that is at least 60%, at least 70%, at least 80%, at least 90%, at least 95%, at least 98%, at least 99% or 100% identical to SEQ ID NO: 796, (e) an amino acid sequence that is at least 60%, at least 70%, at least 80%, at least 90%, at least 95%, at least 98%, at least 99% or 100% identical to SEQ ID NO: 797, (f) an amino acid sequence that is at least 60%, at least 70%, at least 80%, at least 90%, at least 95%, at least 98%, at least 99% or 100% identical to SEQ ID NO: 798, and (g) an amino acid sequence that is at least 60%, at least 70%, at least 80%, at least 90%, at least 95%, at least 98%, at least 99% or 100% identical to SEQ ID NO: 799, and wherein the effector protein interacts with the guide nucleic acid to form a complex that is targeted to a target sequence via base pairing between the guide nucleic acid and the target sequence.

[0307] Also disclosed herein are composition comprising an effector protein, or a nucleic acid encoding the effector protein, and a guide nucleic acid, or a nucleic acid encoding the guide nucleic acid, wherein the effector protein comprises a sequence of amino acids that is at least 37%, at least 40%, at least 50%, at least 60%, at least 70%, at least 80%, at least 90%, at least 95%, at least 98%, at least 99% or 100% identical to SEQ ID NO: 796, and wherein the effector protein interacts with the guide nucleic acid to form a complex that is targeted to a target sequence via base pairing between the guide nucleic acid and the target sequence.

### INCORPORATION BY REFERENCE

[0308] All publications, patents, and patent applications mentioned in this specification are herein incorporated by reference to the same extent as if each individual publication, patent, or patent application was specifically and individually indicated to be incorporated by reference.

### BRIEF DESCRIPTION OF THE DRAWINGS

[0309] The novel features of the invention are set forth with particularity in the appended claims. A better understanding of the features and advantages of the present invention will be obtained by reference to the following detailed description that sets forth illustrative embodiments, in which the principles of the invention are utilized, and the accompanying drawings of which:

[0310] FIG. 1 illustrates PAM preferences for different D2S effector proteins disclosed herein. Frequency of nucleotides at each PAM position was independently calculated using a position frequency matrix (PFM) and plotted as a WebLogo. The number at the top of the plot corresponds to the composition number of TABLE 2 and TABLE 3, denoting the D2S effector protein used, as well as the combination of crRNA, sgRNA, and/or tracrRNA sequence.

[0311] FIG. 2 shows that proteins described herein edit the genome of mammalian cells.

[0312] FIG. 3 shows that proteins described herein edit the genome of mammalian cells at multiple doses.

[0313] FIG. 4 show that proteins described herein, with a REC domain alteration, bind two genome loci of mammalian cells and edit the genome at the locus with varying efficacy normalized to the wild-type. The x and y-axis of the plot corresponds to various targeted loci. The identifier next to each plotted data point denotes the amino acid residue alteration and position in reference to SEQ ID NO: 23.

[0314] FIG. 5 show that proteins described herein, with a RuvC-I domain alteration, bind two genome loci of mammalian cells and edit the genome at the locus with varying efficacy normalized to the wild-type. The x and y-axis of the plot corresponds to various targeted loci. The identifier next to each plotted data point denotes the amino acid residue alteration and position in reference to SEQ ID NO: 23.

[0315] FIG. 6 show that proteins described herein, with a RuvC-II domain alteration, bind two genome loci of mammalian cells and edit the genome at the locus with varying efficacy normalized to the wild-type. The x and y-axis of the plot corresponds to various targeted loci. The identifier next to each plotted data point denotes the amino acid residue alteration and position in reference to SEQ ID NO: 23.

[0316] FIGS. 7A-7E illustrate PAM preferences for different D2S effector proteins disclosed herein generated from in vitro enrichment (E. coli and mammalian) as described in Examples 5, 6, 12, and 13. Frequency of nucleotides at each PAM position was independently calculated using a position frequency matrix (PFM) and plotted as a WebLogo. The numbers and the bottom of each plot correspond to the D2S effector protein used as well as the combination of crRNA, sgRNA, and/or tracrRNA sequences.

[0317] FIGS. 8A-8D illustrate change in gene expression of NEUROD1, HBG1, ASCL1, and LIN28A by different VPR-CasM fusions. FIG. 8A is the change in gene expression by CasM.286251 (D267A) with an N terminal VPR fused by an XTEN10 linker. FIG. 8B is the change in gene expression by CasM.19952 (D267A) with an N terminal VPR fused by an XTEN10 linker. FIG. 8C is the change in gene expression by CasM.19952 (D267N) with an N terminal VPR fused by an XTEN10 linker. FIG. 8D is the change in gene expression by CasM.19952 (E363Q) with an N terminal VPR fused by an XTEN10 linker. The Y-axis shows the relative fold change of RNA levels. The X-axis shows the guide sequences tested. NT denotes a guide with the enzyme's repeat, but a scramble sequence spacer, gpool8 is a pooled control the guides, and dCas9 is a catalytically inactive “dead” Cas9.

[0318] FIG. 9 illustrates the constructs used for base editing of different target genes. The C and N term indicates the location of base editing effector relative to the dCASM.19952 (D267A) protein. The CBE/ABE indicate the location of the effector. The XTEN is the linker used (e.g., XTEN10, XTEN40 or XTEN80). The tagBFP indicates a blue fluorescent protein and t2A indicates a self-cleaving peptide sequence. FIG. 9 at the bottom shows the indel percentage of catalytically active CasM.19952 and gRNAs at respective target sites.

[0319] FIGS. 10A-10B illustrate a change in base call percent along the spacer sequence for the CIITA t26 target. The upper X-axis shows the target sequence along the spacer and the Y-axis shows the % change in base call per nucleotide. FIG. 10A shows the ABE8e-XTEN10-dCasM.19952 (D267A) construct editing of CIITA t26. The editing appeared at position A9 (about 0.94% of As were changed to Gs). FIG. 10B shows the AncBE4Max-XTEN10-dCasM.19952(D267A) construct editing of CIITA t26. The editing appeared at positions C6 and C8 (about 0.70-0.75% of Cs were changed to Ts). The editing at C18 is believed to have occurred from experimental noise.

[0320] FIG. 11A-11B show the conserved motifs that are shared by D2S effector proteins. FIG. 11A shows weblogos of the multilevel consensus sequences of the conserved motifs. Weblogos corresponding to MEME_1, MEME_2, MEME_3, MEME_4, MEME_5, MEME_6 and MEME_7 are shown to the right of the “MEME” descriptor. FIG. 11B shows the location of the detected motifs in the D2S effector proteins.

[0321] FIG. 12 shows Sanger sequencing reads of target and non target strands from CasM.19952 sgRNA complex and a target nucleic acid having a PAM of GTCG.

### DETAILED DESCRIPTION OF THE INVENTION

[0322] It is to be understood that both the foregoing general description and the following detailed description are exemplary and explanatory only and are not restrictive of the disclosure. Herein, the use of the singular includes the plural unless specifically stated otherwise.

[0323] The section headings used herein are for organizational purposes only and are not to be construed as limiting the subject matter described. All documents, or portions of documents, cited in this application, including, but not limited to, patents, patent applications, articles, books, and treatises, are hereby expressly incorporated by reference in their entirety for any purpose.

### II. Definitions

[0324] Unless otherwise indicated, all technical terms used herein have the same meaning as commonly understood by one of ordinary skill in the art to which this invention belongs. Unless otherwise indicated or obvious from context, the following terms have the following meanings:

[0325] As used herein, the use of “or” means “and/or” unless stated otherwise. Furthermore, the use of the term “including” as well as other forms, such as “includes” and “included”, is not limiting.

[0326] “Percent identity,” “% identity,” and % “identical” refers to the extent to which two sequences (nucleotide or amino acid) have the same residue at the same positions in an alignment. For example, “an amino acid sequence is X % identical to SEQ ID NO: Y” can refer to % identity of the amino acid sequence to SEQ ID NO: Y and is elaborated as X % of residues in the amino acid sequence are identical to the residues of sequence disclosed in SEQ ID NO: Y. Generally, computer programs can be employed for such calculations. Illustrative programs that compare and align pairs of sequences, include ALIGN (Myers and Miller, Comput Appl Biosci. 1988 March; 4(1):11-7), FASTA (Pearson and Lipman, Proc Natl Acad Sci USA. 1988 April; 85(8):2444-8; Pearson, Methods Enzymol. 1990; 183:63-98) and gapped BLAST (Altschul et al., Nucleic Acids Res. 1997 Sep. 1; 25(17):3389-40), BLASTP, BLASTN, or GCG (Devereux et al., Nucleic Acids Res. 1984 Jan. 11; 12(1 Pt 1):387-95).

[0327] When comparing two protein sequences, it may be useful to not only look at the percent identity between the aligned sequences, but also at their percent similarity. Certain amino acid substitutions are considered more conservative than others; two amino acids may share characteristics such as electrochemical properties. In these cases, substituting the amino acid may not significantly affect the structure or function of the protein. Therefore, the sequences' % identity may not accurately describe their similarity. Additionally, protecting protein sequences solely on identity runs the risk of other parties skilled in the art making conservative amino acid substitutions (e.g. changing every leucine to an isoleucine) and still obtaining a functional protein. In some instances, compositions and methods disclosed herein comprise an effector protein, or a use thereof, that is substantially similar to an effector protein sequence disclosed herein. Example 25 describes an exemplary method for calculating % similarity.

[0328] As used in the specification and claims, the singular forms “a”, “an” and “the” include plural references unless the context clearly dictates otherwise. For example, the term “a sample” includes a plurality of samples, including mixtures thereof.

[0329] Unless specifically stated or obvious from context, as used herein, the term “about” in reference to a number or range of numbers is understood to mean the stated number and numbers+/−10% thereof, or 10% below the lower listed limit and 10% above the higher listed limit for the values listed for a range.

[0330] The term “alteration” as used herein can refer to the insertion, deletion, or substitution of an amino acid in an amino acid sequence at a position identified relative to a reference or parent sequence.

[0331] As used herein, the term “comprising” and its grammatical equivalents specifies the presence of stated features, integers, steps, operations, elements, and/or components, but do not preclude the presence or addition of one or more other features, integers, steps, operations, elements, components, and/or groups thereof. As used herein, the term “and/or” includes any and all combinations of one or more of the associated listed items.

[0332] The terms “determining,” “measuring,” “evaluating,” “assessing,” “assaying,” and “analyzing” are often used interchangeably herein to refer to forms of measurement. The terms include determining if an element is present or not (for example, detection). These terms can include quantitative, qualitative or quantitative and qualitative determinations. Assessing can be relative or absolute. “Detecting the presence of” can include determining the amount of something present in addition to determining whether it is present or absent depending on the context.

[0333] As used herein, a “catalytically inactive effector protein” refers to an effector protein that is modified relative to a naturally-occurring effector protein to have a reduced or eliminated catalytic activity relative to that of the naturally-occurring effector protein, but retains its ability to interact with a guide nucleic acid. The catalytic activity that is reduced or eliminated is often a nuclease activity. The naturally-occurring effector protein may be a wildtype protein. The catalytically inactive effector protein can be referred to as a catalytically inactive variant of an effector protein, e.g., a Cas effector protein.

[0334] The term “in vivo” is used to describe an event that takes place in a subject's body. The term “ex vivo” is used to describe an event that takes place outside of a subject's body. An ex vivo assay is not performed on a subject. Rather, it is performed upon a sample separate from a subject. An example of an ex vivo assay performed on a sample is an “in vitro” assay. The term “in vitro” is used to describe an event that takes places contained in a container for holding laboratory reagent such that it is separated from the biological source from which the material is obtained. In vitro assays can encompass cell-based assays in which living or dead cells are employed. In vitro assays can also encompass a cell-free assay in which no intact cells are employed.

[0335] As used herein, the terms “treatment” or “treating” are used in reference to a pharmaceutical or other intervention regimen for obtaining beneficial or desired results in the recipient. Beneficial or desired results include but are not limited to a therapeutic benefit and/or a prophylactic benefit. A therapeutic benefit may refer to eradication or amelioration of symptoms or of an underlying disorder being treated. Also, a therapeutic benefit can be achieved with the eradication or amelioration of one or more of the physiological symptoms associated with the underlying disorder such that an improvement is observed in the subject, notwithstanding that the subject may still be afflicted with the underlying disorder. A prophylactic effect includes delaying, preventing, or eliminating the appearance of a disease or condition, delaying or eliminating the onset of symptoms of a disease or condition, slowing, halting, or reversing the progression of a disease or condition, or any combination thereof. For prophylactic benefit, a subject at risk of developing a particular disease, or to a subject reporting one or more of the physiological symptoms of a disease may undergo treatment, even though a diagnosis of this disease may not have been made.

[0336] A “genetic disease”, as used herein, refers to a disease caused by one or more mutations in the DNA of an organism. In some instances, a disease is referred to as a “disorder.” Mutations may be due to several different cellular mechanisms, including, but not limited to, an error in DNA replication, recombination, or repair, or due to environmental factors. Mutations may be encoded in the sequence of a target nucleic acid from the germline of an organism. A genetic disease may comprise a single mutation, multiple mutations, or a chromosomal aberration.

[0337] The term “variant” when used in reference to any amino acid or nucleic acid described herein refers to a sequence having a variation or alteration at an amino acid position or nucleic acid position as compared to a parent sequence. The parent sequence can be, for example, an unmodified, wild-type sequence, a homolog thereof or a modified variant of, for example, a wild-type sequence or homolog thereof.

### III. Introduction

[0338] Disclosed herein are non-naturally occurring compositions and systems comprising an effector protein (e.g., a D2S effector protein), which can be referred to herein as an effector polypeptide, and an engineered guide nucleic acid, which may simply be referred to herein as a guide nucleic acid. In general, an engineered effector protein and an engineered guide nucleic acid refer to an effector protein and a guide nucleic acid, respectively, that are not found in nature. In some instances, systems and compositions comprise at least one non-naturally occurring component. For example, compositions and systems may comprise a guide nucleic acid, wherein the sequence of the guide nucleic acid is different or modified from that of a naturally-occurring guide nucleic acid. In some instances, compositions and systems comprise at least two components that do not naturally occur together. For example, compositions and systems may comprise a guide nucleic acid comprising a repeat region and a spacer region which do not naturally occur together. Also, by way of example, composition and systems may comprise a guide nucleic acid and an effector protein that do not naturally occur together. Conversely, and for clarity, a D2S effector protein or guide nucleic acid that is “natural,” “naturally-occurring,” or “found in nature” includes D2S effector proteins and guide nucleic acids from cells or organisms that have not been genetically modified by a human or machine. The effector protein may be a Cas protein (i.e., an effector protein of a CRISPR-Cas system).

[0339] In some embodiments, an effector protein comprises a protein that is capable of modifying a nucleic acid molecule (e.g., by cleavage, editing, deamination, methylation, demethylation, oxidation, acetylation, deacetylation, or recombination). Such modifications may modulate the expression of the RNA and/or protein encoded by the nucleic acid molecule (e.g., increasing or decreasing the expression of a nucleic acid molecule). In some embodiments, modifying a nucleic acid molecule, such as a target nucleic acid molecule, comprises editing the nucleic acid molecule (e.g., deleting one or more nucleotides of the nucleic acid molecule, inserting one or more nucleotides into the nucleic acid molecule, mutating one or more nucleotides of the nucleic acid molecule), modulating the expression of the RNA and/or protein encoded by the nucleic acid molecule (e.g., increasing or decreasing the expression of a nucleic acid molecule, for example RNA), making epigenetic modifications of the nucleic acid (e.g., methylation, demethylation, acetylation, or deacetylation), or any combination thereof. Modifying can comprise the activity of the fusion partner of an effector protein. For example, an effector protein comprising a fusion partner can have the activity of increasing or decreasing the expression of the RNA and/or the protein of a target nucleic acid.

[0340] In some embodiments, guide nucleic acid comprises a nucleic acid comprising: a first nucleotide sequence that hybridizes to a target nucleic acid; and a second nucleotide sequence that is capable of being connected to a programmable nuclease by, for example, being non-covalently bound by a programmable nuclease or hybridized to a separate nucleic acid molecule that is bound by a programmable nuclease. The first sequence may be referred to herein as a spacer sequence. The second sequence may be referred to herein as a repeat sequence. In some instances, the first sequence is located 5′ of the second nucleotide sequence. In some instances, the first sequence is located 3′ of the second nucleotide sequence.

[0341] In some instances, the guide nucleic acid comprises a non-natural nucleobase sequence. In some instances, the non-natural sequence is a nucleobase sequence that is not found in nature. The non-natural sequence may comprise a portion of a naturally-occurring sequence, wherein the portion of the naturally-occurring sequence is not present in nature, absent the remainder of the naturally-occurring sequence. In some instances, the guide nucleic acid comprises two naturally-occurring sequences arranged in an order or proximity that is not observed in nature. In some instances, compositions and systems comprise a ribonucleotide complex comprising an effector protein and a guide nucleic acid that do not occur together in nature. Engineered guide nucleic acids may comprise a first sequence and a second sequence that do not occur naturally together. For example, an engineered guide nucleic acid may comprise a sequence of a naturally-occurring repeat region and a spacer region that is complementary to a naturally-occurring eukaryotic sequence. The engineered guide nucleic acid may comprise a sequence of a repeat region that occurs naturally in an organism and a spacer region that does not occur naturally in that organism. An engineered guide nucleic acid may comprise a first sequence that occurs in a first organism and a second sequence that occurs in a second organism, wherein the first organism and the second organism are different. The guide nucleic acid may comprise a third sequence located at a 3′ or 5′ end of the guide nucleic acid, or between the first and second sequences of the guide nucleic acid. For example, an engineered guide nucleic acid may comprise a naturally occurring CRISPR RNA (crRNA) and trans-activating crRNA (tracrRNA) coupled by a linker sequence.

[0342] In some embodiments, CRISPR RNA or crRNA is a type of guide nucleic acid, wherein the nucleic acid is RNA comprising a first sequence, often referred to herein as a spacer sequence, that hybridizes to a target sequence of a target nucleic acid, and a second sequence that is capable of being connected to an programmable nuclease by either a) hybridization to a portion of a tracrRNA or b) being non-covalently bound by a programmable nuclease. In some embodiments, the crRNA is covalently linked to an additional nucleic acid (e.g., a tracrRNA) that is bound by the programmable nuclease. In some embodiments, the crRNA and a tracrRNA are in a dual guide system and are not linked by a covalent bond. In such a dual guide system, the crRNA can be connected to the programmable nuclease by hybridization to a portion of the tracrRNA, and the tracrRNA includes a separate portion that is bound by the programmable nuclease.

[0343] In some instances, compositions and systems described herein comprise an engineered effector protein that is similar to a naturally occurring D2S effector protein. In some instances, the engineered effector protein and/or a naturally occurring D2S effector protein is referred to as a polypeptide. The engineered effector protein may lack a portion of the naturally occurring D2S effector protein. The D2S effector protein may comprise a mutation relative to the naturally-occurring D2S effector protein, wherein the mutation is not found in nature. The D2S effector protein may also comprise at least one additional amino acid relative to the naturally-occurring D2S effector protein.

[0344] For example, the D2S effector protein may comprise an addition of a nuclear localization signal (NLS) relative to the natural occurring D2S effector protein.

[0345] In certain embodiments, the nucleotide sequence encoding the effector protein is codon optimized (e.g., for expression in a eukaryotic cell) relative to the naturally occurring sequence.

[0346] In some instances, compositions and systems provided herein further comprise a modified host cell comprising one or more D2S effector protein, engineered guide nucleic acids, and/or nucleic acids encoding the same.

### IV. Effector Proteins

[0347] In some embodiments, an effector protein comprises a protein, polypeptide, or peptide that non-covalently binds to a guide nucleic acid to form a complex that contacts a target nucleic acid, wherein at least a portion of the guide nucleic acid hybridizes to a target sequence of the target nucleic acid. A complex between an effector protein and a guide nucleic acid can include multiple effector proteins or a single effector protein. In some instances, the effector protein modifies the target nucleic acid when the complex contacts the target nucleic acid. In some instances, the effector protein does not modify the target nucleic acid, but it is fused to a fusion partner protein that modifies the target nucleic acid when the complex contacts the target nucleic acid. A non-limiting example of an effector protein modifying a target nucleic acid is cleaving of a phosphodiester bond of the target nucleic acid. Additional examples of modifications an effector protein can make to target nucleic acids are described herein and throughout.

[0348] An effector protein may be brought into proximity of a target nucleic acid in the presence of a guide nucleic acid when the guide nucleic acid includes a nucleotide sequence that is complementary with a target sequence in the target nucleic acid. The ability of an effector protein to modify a target nucleic acid may be dependent upon the effector protein being bound to a guide nucleic acid and the guide nucleic acid being hybridized to a target nucleic acid. An effector protein may also recognize a protospacer adjacent motif (PAM) sequence present in the target nucleic acid, which may direct the modification activity of the effector protein. One of skill in the art understands that the phrase, “an effector protein recognizes a PAM sequence,” may mean that the effector protein when complexed with a guide nucleic acid, is capable of binding and optionally modifying a target nucleic acid. An effector protein may modify a nucleic acid by cis cleavage or trans cleavage. The modification of the target nucleic acid generated by an effector protein may, as a non-limiting example, result in modulation of the expression of the nucleic acid (e.g., increasing or decreasing expression of the nucleic acid) or modulation of the activity of a translation product of the target nucleic acid (e.g., inactivation of a protein binding to an RNA molecule or hybridization). An effector protein may be a CRISPR-associated (“Cas”) protein. An effector protein may function as a single protein, including a single protein that is capable of binding to a guide nucleic acid and modifying a target nucleic acid. Alternatively, an effector protein may function as part of a multiprotein complex, including, for example, a complex having two or more effector proteins, including two or more of the same effector proteins (e.g., dimer or multimer). An effector protein, when functioning in a multiprotein complex, may have only one functional activity (e.g., binding to a guide nucleic acid), while other effector proteins present in the multiprotein complex are capable of the other functional activity (e.g., modifying a target nucleic acid). An effector protein may be a modified effector protein having reduced modification activity (e.g., a catalytically defective effector protein) or no modification activity (e.g., a catalytically inactive effector protein). Accordingly, an effector protein as used herein encompasses a modified or programmable nuclease that does not have nuclease activity.

[0349] Provided herein, in certain embodiments, are compositions that comprise one or more D2S effector proteins. TABLE 1 provides illustrative amino acid sequences of D2S effector proteins. In some instances, the amino acid sequence of the D2S effector protein is at least 65%, at least 70%, at least 75%, at least 80%, at least 85%, at least 90%, at least 95%, at least 97%, or at least 98%, at least 99%, or 100% identical to any one of SEQ ID NOs: 1-45, and 202-240. In some instances, the amino acid sequence of the D2S effector protein is at least 65%, at least 70%, at least 75%, at least 80%, at least 85%, at least 90%, at least 95%, at least 97%, or at least 98%, at least 99%, or 100% similar to any one of SEQ ID NOs: 1-45, and 202-240.

TABLE 1
Exemplary Amino Acid Sequences of Effector Proteins

| SEQ ID | |
|---|---|
| NO: | |
| Effector | |
| Protein | |
| Name | Effector Protein Amino Acid sequence |
| 1 | MAKKGTNRKKMIVKVMKYELKYESGCADFNEMQNELWKLQRQTREVMNR |
| CasM.298706 | TIQLCYHWSYVQADYCKQHGCARRDVKPCDVYETNATSLDGYIYQLFKDEY |
| | PNFLMANLIATLRKAHQKYDALLFDIQEGNSSIPSFKKDQPLIFSKEAIRLPECL |
| | SDKRQITLFCFSKPYKSAHPTLDKITFAVRARSASEKSIFDHIISGKYALGESQL |
| | VYEKKKWFFLLSYKFTPESVDVNPEKVLGVDLGVVNALCAGSVENPHDSLFI |
| | KGTEAIEQIRRLEARKRDLQKQARYPGDGRIGHGTKTRVSPVYQTRDAIARM |
| | QDTLNHRWSRALIDFACKKGYGTIQMEDLSGIKALESEKPYLKHWTYFDLQS |
| | KIIYKAEEKGIRVVKVNPKCTSRRCSACGYISKENRKNQVEFLCVNCGYHHN |
| | ADYNAAQNLSIPQIDRLIEKQLKEQESEENEAGANPK |
| 2 | MAKGTLSKVMKYELRYLDGCGDFQNMQKELWTLQRQSREILNRTIQIAYHW |
| CasM.280604 | DYTDREQFKKTGQHLDIKAETGYKRLDGYIYDSLKEDVQNFASVNVNATIQK |
| | AWAKYKSSKIDVLRGDMSLPSYKSDQPLVLHAQSMKIFSSDDDDVLQVTLFS |
| | NAYKKACNYSNIRFIIGLHDATQRTIIKKVLSGDWGIGQSQIVYKRPKWFLYL |
| | TYNFSPEQHEVNPDKILGVDLGESIAIYASSIGEYGSLRIEGGEISAFAKQLEAR |
| | KRSLQKQAAYCGKGRIGHGTKSRVSDVYKMEDKIANFRNTVNHRYSKMLID |
| | YALKHMYGTIQMEDLSGIKKETGFPKFLQHWTYYDLQQKIEAKAKEHGINFI |
| | KVDPAFTSQRCSKCGNIDSENRPSQAVFCCKKCGYKTNADFNAS |
| 3 | MNVTKVMRYQLIYQGGGGDFESLQNQLWEFQRQTRAILNKTIQTMYLATAN |
| CasM.281060 | QEKFSEKALYHDLCAEYPDMISSTVNATLREATKKYRSSVREILAGRMSLPSY |
| | KRDHPILLHNQSVALKQGNQGSYFATISVFSRKYQQGTPGVKQPSFQLIAKDN |
| | TQRTILQRLLSGEYKLGQCQLIYIRPKWFLNVAYSFTPSEKALDQEKVLGVDL |
| | GCVYAIYASSYGNHGIFKISGDEITSFERKQAAIQNRAFKNDLTRIREIEERRKQ |
| | KLEQARYCGEGRIGHGVKTRVAPAYQDEGKISRFRETINHRYSKALVDYAEK |
| | NGYGTIQMEDLSGIKSSTGFPKRLQHWTYFDLQQKIKYKAEEQGIKVVKIKPA |
| | YTSQRCSRCGHIDPANRKSQSEFKCIACGFSSNADYNASQNISMRNIEKIIQGK |
| | AN |
| 4 | MAKGTITKVMKYELRYLGGFSDFHEMQKEVWQLQRQYREILNKTIQIALHW |
| CasM.284933 | DYVSAQQFGESGTYLDIREETGYKTLDGYIYNCLKGAYSEMASANLNAAVQ |
| | KAWKKYKNSKTQVLQGVMSLPSYKSDQPILIDKGNVKLSAEENNGRAVLTL |
| | FSRNYRDTRGLKGNVEFSVLLHDGTQKSIFRNLIDKTYALGQCQLVYERKKW |
| | FLLLTYSFTPAGHALDPEKILGVDLGECYALYASSCYAPGILKIEGGEIAEYAL |
| | RLEKRKRSLQQQARYCGEGRIGHGTKTRVGVVYKAEDRIASFRETINHRYSK |
| | ELVDYAVSNGYGTIQMEDLSAIQKDLGFPKRLRHWTYYDLQMKITNKAKEH |
| | GIAVVKIDPRYTSQRCSKCGHIDPANRPRQEEFCCTACGYACNADYNASQNIS |
| | IKGIEKIIQKMLSAKAD |
| 5 | MSKGMLTKVMKYTLRYVGGCGDFHEMQSILWELQKQTRAVLNKTIQIAFEW |
| CasM.287908 | DYRSREAFQETGEYLDVHAETGYKRLDGYIYNCLKNEYADFAGKNLNAAIQ |
| | TAWKKYNQSKRDIQTGKMSLPSYRSNQPLIIHNDNVMISQDMQAAPSVRFTL |
| | LSLEYKKAHDLNTNPTFEVLINDGTQRAIFEKVRSGEYKLGQCMIQYDKKKW |
| | FLLLTYSFQPEKLTLDKNKILGVDLGETIVICASSVSERGRFVIDGGEITRFATQ |
| | IEARKRSQQHQAAYCGEGRIGHGTKTRVDAVYKTEDRIANFRDTINHRYSRA |
| | LVNYAVKHGFGTIQMEDLSGIKSSDDFPKFLRHWTYYDLQSKIESKAKERGIA |
| | VVKVNPRFTSRRCSKCGYIDEGNRKDQAHFCCLSCGFRANADFNASQNLSIK |
| | GIDKIIEKEYNANSKQT |
| 6 | MGKPITKTMKYQIHYIDGCGDFHNMQKELWDLQRIVRQILNKTINESYLWFV |
| CasM.288518 | RSEQYYRDTGENLSVEEQTGYKTLDGHIYNLLKQEYTQKLVSNSLNASIQAA |
| | YKKMKDSRRDVMIGTMSLPSYRSDQPIIIYNKNIKFSSHPEHGFVVDCSLFSDA |
| | YKKSQGYEKSVKFQVSVDDNTQRSIFENILTGNYKHGQCSIVYEKKKWFLLL |
| | TYSFVPEETKLDPDKILGVDVGVVYALYASSKGNHGTFKIKGDEAITFIQRVE |
| | ARKHSRQLQGTYCGDGRIGHGTKTRVQPVYNERALISNFQDTINHRYSKALI |
| | DYAKKNGYGTIQMEDLSGIKEVQQYPKYLQHWTYYDLQLKIQYKAKEAGIG |
| | FVKVTPKYTSQRCSHCGNIDEANRPKQDVFRCTVCGYERNADYNASQNLSIK |
| | GIDRIIDDQLKQMNKANPKKTENA |
| 7 | MSGGAITKVMKYDLTYKDGYGNFKDMQEAVWKLIRDTRTILNETIKIAYHW |
| CasM.293891 | DYLNEKSKRETGEHLDLLEETGYKRLDGYIYDDLKDRFPDFASSNLNAAIQT |
| | AWKKYKQSQKDVYIGKMTLPSYKSDQPLPINKQSIKIYDEEREHIVELNLFST |
| | KHKKEHGLASNVRFRINLHDNTQHAIYERVLSGEYTLGQCQLLYDRPKWFFI |
| | LTYSFKPAQNKLDPDKILGVDMGETCALYASTFGEQGSFVINGGEVSEYAKR |
| | EEARKRSLQKQAAVCGEGRIGHGTKTRVSSVYKEQERISNFRDTINHRYSKAL |
| | IEYAVKNGCGTIQMEDLSGIRQSTDFPKFLRHWTYYDLQQKIKTKAKETGIAV |
| | SMIDPRYTSQRCSRCGHIDKANRKDQAHFHCLKCGYSCNADFNASQNISIRGI |
| | DKIIQKELGAKAKQTD |
| 8 | MKEIAKVMKYQLIYLDGGGDFYELQQTLWDLQRQTREILNKTIQSMYLATAT |
| CasM.294270 | NTAFEENALYHRFGAEYPMMAALNVNATLRTAKKRYTSTIKETLRGTMSLPS |
| | YKRDQPILLHNQTIHLALEDGQYSALFSVYSEKFQKAHEGVARPRFALMARD |
| | GTQRAILDRLLDGSYRLGQSQMTYEQKKWFLSLTYKFVPEVRELDKSKILGV |
| | DLGCVYAIYASSMQQKGIFKISGDEITEFEKRQAAMQNREPVSTLERVEQLEQ |
| | RRWQKQQQARYCGEGRVGHGTGTRVAPAYRDADKIARFRDTINHRYSKAL |
| | VEYAEKNGFGTIQMEDLSGIKEDTGFPKRLRHWTYFDLQTKIQYKAAERGIT |
| | VVKIDPQYTSQRCSRCGYIDKANRASQEKFLCQSCGFEANADYNASQNISVE |
| | KIDKLIAKDKKKLART |
| 9 | MGQVTKVMRYQLIYQDGGGDFYTVQQELWELQRQTREILNKTIQTMYLADA |
| CasM.294491 | NKEKFDNAAERTLNRRFCVDHPDMYTKTVTATLRKAKAKYNASQKEILAGR |
| | MSLPSYKRDQPILLNPQGFKIEEESDSFFAAIAVFSDKYKNKHPDVDVKRLRF |
| | RLVVKDGTQRAIIRRVISGEYKLGRSQLLYSKKKWFLNVTYSFEPAEKKVDP |
| | DKILGVDLGCVYAIYASSFGSPGVFKISGDEVSSFERKQAAIQNRSPKSTLERV |
| | EKIEERHKQKQQQARYCGEGRIGHGTKTRIAPVYQDEDKIARFRDTVNHRYS |
| | KALIDYAEKNGYGTIQMEDLSGIKSATGFPKRLKHWTYYDLQTKIEYKAEER |
| | GIKVVKIDPRYTSQRCSRCGYIDSGNRKSQAEFCCMACGFSCNADYNASQNIS |
| | IGGIAKIIADKRKEADAK |
| 10 | YLDIREETGYKTLDGYIYNCLKGAYSEMASANLNAAVQKAWKKYKNSKTQ |
| CasM.295047 | VLQGVMSLPSYKSDQPILIDKGNVKLSAEENNGRAVLTLFSRNYRDTRGLKG |
| | NVEFSVLLHDGTQKSIFRNLIDKTYALGQCQLVYERKKWFLLLTYSFTPAGH |
| | ALDPEKILGVDLGECYALYASSCYAPGILKIEGGEIAEYALRLEKRKRSLQQQ |
| | ARYCGEGRIGHGTKTRVGVVYKAEDRIASFRETINHRYSKELVDYAVSNGYG |
| | TIQMEDLSAIQKDLGFPKRLRHWTYYDLQMKITNKAKEHGIAVVKIDPRYTS |
| | QRCSKCGHIDPANRPRQEEFCCTACGYACNADYNASQNISIKGIEKIIQKMLS |
| | AKAD |
| 11 | MAEKTIVKVMKFELRYIDGAGEFSEMQKHLWELQKQTREVLNKTIQMGYAL |
| CasM.299588 | ECKRFAHHDKTGQWLDDKELTGSKYKAVADYINAELKEDYNIFYSDCRNST |
| | VRKAYKKFKDAKNKIFSGEMSLPSYRSNQPIIIHNRNVIIRGNAESALVGLKVF |
| | SDGFKALHGFPAAVNFKLCVKDGTQRAIIENVISEIYKISESQLIYDNKKWFLI |
| | LAYRFTQKKNDLNPDKILGVDLGVKFAVYASSIGEYGSFRIKGGEVTEFIKRL |
| | EKRKKSLQNQATVCGDGRIGHGTKTRVADVYKARDKISNFQDTINHRYSRAI |
| | VDYARKNGYGTIQLEKLDNSIEKKGDYSPVLVHWTYYDLRTKMEYKAAEYG |
| | IKVIAVEPKYTSQRCSKCGYISSENRKTQESFECIKCGYKCNADFNASQNLSVR |
| | DIDRIIDEYLGANPELT |
| 12 | VVNVAKGALSKVMKFELSYLDGCGDFQNMQKELWTLQRQTREILNRTIQIA |
| CasM.277328 | YHWDYTDREHFKKTGQHLDVKSETGYKRLDGYIYDELKETVQNFASVNVN |
| | ATIQKAWAKYKSSKTDVLRGDMSLPSYKSDQPLVLHAQSIKLSEDKDGPVLQ |
| | VTLFSNAHKKACDYSNVRFAFRLHDATQRAIFKNVLSGEYGLGQSQIVYKRP |
| | KWFLYLTYNFSPEQHGLDPDKILGVDLGESIALYASSLGDYGSLRIEGGEVTA |
| | FAKQLEARKRSLQKQAAHCGEGRVGHGTRARVSDVYKAEDKIANFRNTVN |
| | HRYSKKLIEYAIQNRYGTIQMEDLSGIKQDTGFPKFLQHWTYYDLQQKIEAK |
| | AKENGINFIKVDPSYTSQRCSKCGNIDSDNRPSQAVFCCTKCGFRANADFNAS |
| | QNLSIPEIDKIIKKERGANTK |
| 13 | MAKKGTNRKKMIVKVMKYELKYEKGCADFNEMQNELWKLQRQTREVMNR |
| CasM.297894 | TVQLCYHWNYVQADYCKQHGCAHRDVKPCDVYETNATSLDGYIYQLFKDE |
| | YPNFLMANLIATLRKAHQKYDALLPDIQEGNSSIPSFKKDQPLIFSKEAIHLPE |
| | CLSDKRQITLFCFSKPYKSAHPTLDKITFAVRAHSASEKSIFDNIINGKYALGTS |
| | QLVYEKKKWFFLLSYKFTPESVDVNPEKVLGVDLGVVNALCAGSVENPHDS |
| | LFIKGTEAIEQIRRLEARKRDLQKQARYPGDGRIGHGTKTRVSPVYQTRDAIA |
| | RMQDTLNHRWSRALIDFACKKGYGTIQMEDLSGIKAMESEKPYLKHWTYFD |
| | LQSKIIYKAEEKGIRVVKVNPKCTSRRCSACGYISKENRKNQAEFLCVNCGYH |
| | HNADYNAAQNLSIPQIDRLIEKQLKEQESEESEAGANPK |
| 14 | MTERHDNESSKIKAEVSLLNSSVPDFEKKRHVKVLKLHILKPAGDMKWDELG |
| CasM.291449 | ALLRDARYRVFRLANLAISEAYLDFHKWRSGGNEQPKLKISQLNRNLRSMLE |
| | DEVTGKQTKMIKSDRYSKSGALPDSIVSPLSMYKLGGLTSKSKWSEVLRGKS |
| | SLPTFKLNMAIPVRCDKPGDRRIERTKNGDAEVELRICLQPYPRVIIATGRNSL |
| | GDGQRAILDRLLDNTKYSEQGYRQRCFEIKEDQRSGKWHLFVTYDFPAIEPA |
| | KNLSRERIVGVDLGAACPLYAAINTGHARLGWKHFSPLAARVRALQNQTIRR |
| | RRQILRGGKVSLSEDSARSGHGRKRKLKPISKLEGKIDRAYTTLNHQLSATVI |
| | KFAKDNGAGVVQMEDLKGLRETLTGTFLGERWRYEELQRFIRYKADEAGIEI |
| | RLVNPQYTSRRCSECGHIHKDFTREFRDKSREGNKSVRFLCPDCGFTADPDYN |
| | AARNLASLDIAAIIERQLEIQGLRKHDP |
| 15 | MKEKSKTLVKVARLRILKPAGDMKWSELGEMLRTVRYRVFRLANLAVSEAY |
| CasM.297599 | LGFHMYRTNRATEFKAETIGKLSRRLREMLIEEGVDEKDLSRYSQTGAVPDT |
| | VAGALGQYKIRGITSPTKWRQVVRGQAALPTFRNDMAIPIRCDKQYQRRLEK |
| | TEAGEIEVELMICRKPYPRIVLGTADLGPGQRAILERLLQNTDNSADGYRQRL |
| | FEAKQDTQTKKWWLYVTYDFPRLKEGKLNQEIVVGVDLGFSIPLYVALNIGH |
| | ARLGRRHFQALGNRIRSLQRQVLARRRSIQRGGRVNISHSTARSGHGRKRKLL |
| | PTEKLRGRIEKSYSTLNHQLSASVIDFAKNHHAGTIQIEDLANLKEELAGTFIG |
| | ARWRYHQLQQFLKYKAEEAGITLNQVNPRYTSRRCSECGFINIDFDRAFRDA |
| | GRTEGRVTKFLCPECGYEADPDYNAARNISILDIDKLIRVQCKKQGLTYDAH |
| 16 | MPERPKTVNKVIWFQIHKPAGDMTWKELGNLLREARYRVFRLANLAVSEKY |
| CasM.286588 | LSFHMWRTGQEYKSETIGKLNRRLREMLIEEGVEEESQKRFSATGALPDTVVS |
| | TLAKGKLAAITSKSKWKDVVNGKTSLPTFKLNMAIPVRCDKAEQRRLRRTES |
| | GDVELELMICKQPYPRVVLKTGKLKSGQRAILDRLVENNDNSKEGYSQRVFE |
| | IKQVENNDGSKEWRLYISYTFPKKAVEANADVAVGVDIGFSVPLVAAVNNG |
| | LERLGYNDFRALNERIRSLQRQVLVRRRSMQSGGRDYVSTPTARSGHGRKRK |
| | LLPIQTLRKRWDNAYTTLNHQLSHAVVSFAENHGAATIQIENVKSLKDELRG |
| | TFLGQRWRYFELQQFLKYKADEVGIELREVNARYTSRRCSECGYINMAFTRQ |
| | ARDKGRVDGKPMEFVCPECGYKAHPDYNAARNIAMLDIEQKMQVQCKQQG |
| | ITYADDSEVL |
| 17 | MTWPELGNMLRTVRYRVFRLANLAVSEAYLGFHMFRTKRAEEFKAETMGK |
| CasM.286910 | LSRRLREMLIEEGVDEKDLSRYSQTGAVPDTVAGALSQYKIRGITSPTKWRQI |
| | VRGQVALPTFRNTMSIPVRCDKLYQRRLEQGDSGEVEVELMICRNPYPRVVL |
| | GTGDLNPGQQAILERLLQNTDNSADGYRQRLFEIKEDVQTRKWWLYVTYDF |
| | PKTTGKLNPEIVVGVDLGFSIPLYVALNSGHARLGYLHFKALGERIKSLQKQV |
| | MARRRAIQRGGRVSISHSTARTGHGVKRKLQPTEKLRGRIEKSYSTLNHQLSA |
| | SVIDFAKNHHAGVIQIEDLSGLKEQLTGTFIGARWRYHQLQQFLKYKAEEAGI |
| | TLKQINPRYTSRRCSECGFINMDFDRAFRDAGRTYGKVTKFLCPECGYEADP |
| | DYNAARNIATLDIEKLIRVQCEKHGLKFDAH |
| 18 | VGKEGKRNVKVMKIRILKPCDGMTWNELGQLLRDARYRVFRLANLTVSEAY |
| CasM.292335 | LNFHLWRTGRSQEFKKQTIGQLNRQLRNILQQEKYDDEKLNRYSKTGALPDT |
| | VCSALWQYKLMAVMKKSKWSEVIRGKSSLPTFRNDMAIPVRCDKPEQKRIE |
| | KTEQGQVEAALQVCVQPYPRVILGTHTLGDGQDAILKRLLDNQNQAIGGYRQ |
| | RSFEIKYDEQKRWWLFITYDFPATEVATDKTIAVGVDLGVSVPLYAAVNNGP |
| | ARLGRREFGGLGRRIRDLRNQTDARRRSIQRSGREGQSDDTARAGHGRKRKL |
| | LPIHILEGRLDKAYTTLNHQMSAAVIKFAAEQGAGIIQIENLAGLQDELRGTFI |
| | GGRWRYRQLQDFLKYKTQEMGIELRQVNPKYTSRRCSKCGFIHKDFDRDYR |
| | NRHSENGKPAQFVCPNPDCKYESDPDYNAARNLATLDIEEQIRVQCQKQGLE |
| | YDSKKDKNAL |
| 19 | MKEKSKTLVKVARLRILKPAGDMTWSELGEMLRTVRYRVFRLANLAVSEAY |
| CasM.293576 | LGFHMFRTQRAAEFKAETMGKLSRRLREMLIEEGVDEKELNCYSLTGAVPDT |
| | VAGALHQYKIRGITSPTKWRQVVRGQAALPTFRNDMSIPIRCDKPYQRRLEK |
| | TEAGEVEVELMICRKPYPRIVLGTADVGPGQEVILERLLQNKDNSSDGYRQRL |
| | FEAKQDRQTGKWWLYVTYDFPRPEEGELNPEIVVGVDLGFSVPLYVAINNGY |
| | ARLGRRHFQALGNRIRSLQRQVLARRRSIQRGGRVNISHDTARSGHGIKRKLL |
| | PTEKLRGRIEKSYSTLNHQLSASVIDFTKNHHAGTIQIEDLANLKEVLAGTFIG |
| | ARWRYHQLQQFLKYKADEAGITLKEVNPRYTSRRCSECGFIHKDFDRAFRDS |
| | GRTDGKVARFVCPECGYGPVDPDYNAAKNISTLDIEKHIRVQCKKQGLEYEV |
| | H |
| 20 | MKEKAKTLVKVARLRILKPAGDMTWPELGNMLRTVRYRVFRLANLAVSEA |
| CasM.294537 | YLGFHMFRTKRAEEFKAETMGKLSRRLREMLIEEGVDEKDLSRYSQTGAVPD |
| | TVAGALSQYKIRGITSPTKWRQIVRGQVALPTFRNTMSIPVRCDKLYQRRLEQ |
| | GDSGEVEVELMICRNPYPRVVLGTGDLNPGQQAILERLLQNTDNSADGYRQR |
| | LFEIKEDVQTRKWWLYVTYDFPKTTGKLNPEIVVGVDLGFSIPLYVALNSGH |
| | ARLGYLHFKALGERIKSLQKQVMARRRAIQRGGRVSISHSTARTGHGVKRKL |
| | QPTEKLRGRIEKSYSTLNHQLSASVIDFAKNHHAGVIQIEDLSGLKEQLTGTFI |
| | GARWRYHQLQQFLKYKAEEAGITLKQINPRYTSRRCSECGFINMDFDRAFRD |
| | AGRTYGKVTKFLCPECGYEADPDYNAARNIATLDIEKLIRVQCEKHGLKFDA |
| | H |
| 21 | MAKKAKTMFKVTNFRILKPAGDMTWKELGQLLRDARYRTFRMANLALSEA |
| CasM.298538 | YLNFYLLKKGDLKEYKNVKIGQIAKRLRDMLIEEGVDEEVQNRFSPKVALPA |
| | YVYSALDQFKLRGLTSKSNWKKVLRGQASLPTFRLNMSVPIRCDKPEHRRLE |
| | KTENGNVEVDLMICRKPYPRVVLETLKLDGSSKAILDRLLENEDNSPGNYRQ |
| | RCFEVKQNPRSNDWWLYVTYEMPVDKDKKLDPKVIVGVDLGFSVPLYVAIN |
| | NGHARLGRRHFQALGKRIHNLQNQVLARRRSIQRGGQVNLSHSTSRSGHGRK |
| | RKLQPTEKLQQKINSAYSTLNHQLSSSVIDFANNHKAGTIQIEDLETLKEQLTG |
| | TYIGRQWRYYQLQQFIEYKAKENSITVKKINPKYTSRRCSMCGHIHADFDRTF |
| | RDRSSNKGFVTKFICPECNFEADPDYNAAKNISTLDIENKIKLQCKKQKIDY |
| 22 | MPKITRKIELLFDRSGLSEEECKEKWRFIYQINDNLYRVANRLVNQLYLADEI |
| CasM.19924 | DDILRLSDQEYIALRKKLANKKLDEATRISLEEQMSQVMKRVNERRSAILQRP |
| | QQSFAYSVVTDSDTEGLTAKILDVLKQDVLSHYKADTKEVLKGEKSISNYKK |
| | GMPIPFAFNDSLRLYKEDGFFYLKWYNGIRFLLNFGRDASNNQLIVERCLGIS |
| | KDEISYKACSSSIQIKKKGNHSKIFLLLVVDVPVEQYAQKPNMVVGVDLGLN |
| | VPIYAASNSTLERKAIGSREAFLNQRGAFQRRFRALQRLQTTKGGRGRLHKLE |
| | PLERVREAERNWVRTQNHLFSREVINFAIDVGASTIQMEKLANFGRDAQGEV |
| | REDKKYVLRNWSYFELQNLIEYKAKRAGIKVKYINPAFTSQTCSECGQLGER |
| | DSIHFKCTNPDCPNCGKDIHADYNGARNIAKSKDYIK |
| 23 | MPTITRKIELTLLTEGLSEEQRKEQWGLLYHINDNLYKAANNISSKLYLDDHV |
| CasM.19952 | SSMVRMKHAEYLSLLKELARAEKQKTPDADAIAELRKKVAAAEKEMTDQEH |
| | AICKYATEMSTQSLSYRFATELETNIFAKILDCLKQGVFATFNSDARDVKRGE |
| | RAIRNYKKGMPIPFAWDKSLRIEKDNKDFYLRWYNGLRFLFNFGKDRSNNRL |
| | IVERCLKMDADYDGEYKLCNSSIQIAKREGKTKLFLLLVVKIPQEHVELNKKV |
| | VVGVDLGINVPAYVATNITEERKAIGDREHFLNSRMAFQRRYKSLQRLRGTA |
| | GGKGRAKKLEPLERLRKAEHNWVHTQNHLFSREVVDFAVKSHAATIHMEDL |
| | SGFGKDNDGNADERKEFVLRNWSYYELQNMIAYKAAKYGIKVEKIHPAYTS |
| | KTCSWCGQLGFREGVTFICENPECKQCGEKVHADYNAARNIANSKDIIKKNE |
| 24 | MPTITRKIELTLCTDGLSEEQRKEQWGLLYHINDNLYKAANNISSKLYLDDHV |
| CasM.274559 | SSMVRMKHAEYLSLLKELARAEKQKTPDADAIAELKKKVAATEKEMTDQEH |
| | AICKYATEMSTQSLSYRFSTEFETKIFAKILDCLKQGVFATFNSDAKDVKRGE |
| | RAIRNYKKGMPIPFAWTDSLRIKKDNKDFYLLWYNGLRFLFNFGKDRSNNRL |
| | IVERCLKMDADYDGEYKLCNSSIQIAKREGKVKLFLLLVVSIPKEHVELNKKV |
| | VVSVDLGINVPAYVATNITEERKAIGDREHFLNSRMAFQRRYKSLQRLKGTT |
| | GGKGRTKKLEPLERLRKAEHNWVHTQNHLFSREVVDFAVKTHAATIHMEDL |
| | SGFGKDNDGNADERKEFVLRNWSYYELQNMISYKAAKYGIKVEKIRPAYTS |
| | KTCSWCGQHGFREGVTFICENPACKQCGEKVHADYNAARNIANSKEIIKKNE |
| 25 | MPTITRKIELTLCTEGLSDQERKDQWNLLYHINDNLYRAANNISSKLYLDDHV |
| CasM.286251 | GSMVRLKHAEYLSLLRALEKAKKQKAPDEEVIAELSQQVATAEQEMDEQAK |
| | AICQYATEMSTQTLSYRFATELETNIFGQILTCLRQGVFSTFNSDARDVKRGE |
| | RSIRTYKKGMPIPFPWNDSLRIGFEDGEFYLRWYNGLRFRFDFGKDRSNNCLI |
| | VQRCMKMDKDYEGDYKLCNSSIQMVKREGKPKFFLLLVVNIPQERVELNKN |
| | IVVGVDLGINAPAYVATNTTPERKQIGDREHFLNERMAFQRRFKSLQRLKGT |
| | TGGRGRAKKLEPLERLRKAEQNWVHTQNHLFSREVIDFAVKARAATIHMED |
| | LSGFGKDNDGNADERKEFVLRNWSYYELQNMITYKAAKYGIKVEKIRPAYT |
| | SKTCSWCGHQGFREGITFICENPECKKFGEKEHADYNAARNIANSKEIIKNNE |
| | E |
| 26 | MPTITRKIELTLLTEGLSEEQRKEQWGLLYHINDNLYKAANNISSKLYLDDHV |
| CasM.288480 | STMVRMKHAEYLSLLRELARAEKQKKPDVDAIAELREKVTAAEKEMSDQER |
| | AICTYATEMSTQSLSYRFATEIETNIFAKILDCLKQGVFATFNSDARDVKRGER |
| | AIRNYKKGMPIPFAWDKSLRIEKDNKDFYLRWYNGLRFLFNFGKDRSNNRLI |
| | VERCLKMDADYDGEYKLCNSSIQIVKREGKVKLFLLLVVSIPQEHVELNKKIV |
| | VGVDLGINVPAYVATNITEERKAIGDREHFLNSRMAFQRRYKSLQRLKGTAG |
| | GKGRTKKLEPLERLRKAEHNWVHTQNHLFSREVVDFAVKSHAATIHMEDLS |
| | GFGKDNDGNADERKEFVLRNWSYYELQNMIAYKAAKYGIKVERIRPAYTSK |
| | TCSWCGQLGFREGVTFICENPECKQCGEKVHADYNAARNIANSKDIIKKNE |
| 27 | MPTMTRKIELKLCTEGLSDEERKAQLGLLYHINDNLYKAANNISSKLYLDDH |
| CasM.288668 | VSSMVRLKHAEYLSLLNEFEKAKKKGDEEQIVELSLRVAAAEKELTDQELAI |
| | CKYATEMSTDTLAYRFANEIEINVFGQILACLKQGIHSTFKKDAADVKRGERA |
| | IRNFKKGMPIPFPWSKSIRIENEGSDFYLRWYNGLRFRFDFGKDRSNNRLIVSR |
| | CLNLDPDFEDEYKLSNSSLQMVKRDGRPKLFLLLVVNIPQENVELNKKIVVG |
| | VDLGINSPAYVATNITMERQRIGSRDTFLNARMAIQRRFQSLQKLQNTAGGR |
| | GRKKKLEPLERLKETERNWVRTQNHLFSRDVVQFAVKTRAATIHMEDLSGF |
| | GKDDDGNADEKKEFVLRNWSYYELQTMIKYKAAKYGIKVEKIRPAYTSRTC |
| | SWCGHEGDRKGETFICENPECEKYGKKENADYNAARNIANSTDIIK |
| 28 | MPTITRKIELTLCTEGLSDEQRKEQWGLLYHINDNLYKAANNISSKLYLDEHV |
| CasM.289206 | SSMVRMKHAEYLSLLKELARAEKQQTPDEGLIAELSRKLSAAEKEMADQEL |
| | AICKYATEMSTQTLSYNFAKEIETNIFGQILTCLRQGVYATFNSDAKDVKRGE |
| | RAIRNYKKGMPIPFPWNNSLKIESDSGEFYLRWYNGLRFLLTFGKDRSNNRMI |
| | VNRCMKMDEDFEGEYKLCNSSIQLAKRDGKPKLFLLLVVNIPQEHVKLNKKI |
| | VVGVDLGVNVPAYVATNITEERKAIGDREHFLNTRMAFQRRYKSLQRLKGT |
| | AGGKGRTKKLEPLERLRDAERNWVHTQNHLFSREVVNFAVQARAATIHMED |
| | LSGFGKDKDGNADEKKEFVLRNWSFYELQNMIAYKSAKYGIKVVKIRPAYTS |
| | KTCSWCGQQGDRKSTTFICENPKCKHYGESIHADYNAARNIANSNDIVKENE |
| 29 | MPKITRKIEMTLCTEGLSDEQRKEQWGLLYHINDNLYKAANNISTKLYLDEH |
| CasM.290598 | VSSMVRMKHADYLSLLKELAKAEKKSPDEDLIAELREKLAAAEQEMTDQEL |
| | AICKYATEMSTQTLAYKFATEIEINVFGQILACLKQAAQSNFKSDAKDVKRGE |
| | RAIRNYKKGMPIPFPWNDNIRIDADGDEFYLRWYNGLRFHLTFGKDKSNNRM |
| | IVKRCLKMDKDFEGEYKLCNSSIQMVKRDGKPKLFLLLVVNIPQEHVELNKN |
| | VVVGVDLGVNVPAYVATNITEERKAIGEREHFLNTRMQIQRRYKSLQRLKAT |
| | AGGKGRTKKLEPLERLRKAEHNWVHTQNHLFSREVVNFAVQTHAATIHMED |
| | LSGFGKDDDGNADEQKEFVLRNWSFYELQNMIAYKAAKYGIKVEKVKPAYT |
| | SKTCSWCGQLGFRQGVTFICENPACKQCGEKVHADYNAARNIANSKDIIKKN |
| | E |
| 30 | MPTITRKIELHLCTDGLTDEQQKAQRLLLYHINDNLYKAANNVSSKLYLDEH |
| CasM.290816 | VSSMVRLKHDEYLSLSRELARAEKKHDDELTTELRGKLAAAEREMTDQELAI |
| | CKYATEMSTQSLSYRLVTELETKIFAKILDCLKQGVYATFNSDARDVKRGER |
| | AIRNYKKGMPIPFAWNDSVRIEYDEKEKDFYLRWYNDIRFKFHFGRDRSNNR |
| | LIVSRCLKLDKDYEGDYQLCNSSIQIVKRDGSTKFFLLLVVKIPQEHVELNKRI |
| | VVGVDLGINYPAYVATNCTEERMYIGDREHFLNTRMQFQRRYKSLQKLKGT |
| | AGGKGRSKKLEPLERLRNAERNWVHTQNHLFSLKVVNFAVQTHAATIHLED |
| | LSGFGKDDDGNADERKEFVLRNWSYYELQSMIEYKAKKYGIKVEKIRPAYTS |
| | QTCSWCGQRGFRQGVTFICENPECKKCGEKENADYNAARNIANSKDVIKDK |
| | NE |
| 31 | TPFVLYFQNYSLSLRQHITLYSMPTITRKIELTLCTEGLSDQERKDQWNLLYHI |
| CasM.295071 | NDNLYRAANNISSKLYLDDHVGSMVRLKHAEYLSLLRAMEKAKKQKAPDEE |
| | VIAELSQQVAAAEQEMDEQAKAICQYATEMSTQTLSYRFATELETNIFGQILT |
| | CLRQGVFSTFNSDARDVKRGERSIRTYKKGMPIPFPWNDSLRIGFEDGEFYLR |
| | WYNGLRFRFDFGKDRSNNRLIVQRCMKMDKDYEGDYKLCNSSIQMVKREG |
| | KPKFFLLLVVNIPQERVELNKNIVVGVDLGINAPAYVATNTTPERKQIGDREH |
| | FLNERMAFQRRFKSLQRLKGTTGGRGRAKKLEPLERLRKAEQNWVHTQNHL |
| | FSREVIDFAVKARAATIHMEDLSGFGKDRDGNADERKEFVLRNWSYYELQN |
| | MITYKAAKYGIKVEKIRPAYTSKTCSWCGHQGFREGITFICENPECKKFGEKE |
| | HADYNAARNIANSKEIIKNNEE |
| 32 | MPTITRKIELHLCTEELSDEQQKAQRLLLYHINDNLYKAANNVSSKLYLDEHV |
| CasM.295231 | SSMVRLKHDEYLSLLRELARAEKKADDELATQLREKLVAAEREMTDQELAIC |
| | KYATEMSTQSLSYRFVTELETKIFAKILDCLKQGVYATFNSDSRDVKRGERAI |
| | RNYKKGMPIPFAWDKSVRIEYEEKEKDFFLRWYNDIRFKFHFGRDRSNNRLI |
| | VSRCMKLDKDYEGDYQLCNSSIQIVKRDGSTKYFLLLVVKIPQEHVELNKKIV |
| | VGVDLGINYPAFAATNCTEERMSIGDREHFLNTRMQFQRRFKSLQRLKGTTG |
| | GKGRNKKLEPLERLRKAEHNWVHTQNHLFSLKVVNFAVQAHAATIHLEDLS |
| | GFGKDDDGNADERKEFVLRNWSYYELQNMIKYKAKKFGIQVEKIRPAYTSQ |
| | TCSWCGQRGFRQGITFICENPECKKCGEKENADYNAARNIANSKDIIKDKDE |
| 33 | MPIITRKIELHISKEGLSAEDYKAQWQYLRQINDNLYMAANRVSSHCFLNDEY |
| CasM.292139 | KYRLCLQIPDYIDIEKQLKDSKRARLSKEELGQLKKRKKELENTVKGRFQDEF |
| | EKNSLYTIISNEFGEIIPGQILTCLRQCVQSKYNRAKEELEKGERAISTYKKGMP |
| | IPFPINKSIRLQKQGEDFVLKWYNKIVFKLHFGRDRSNNRVIVERLIQSALNDK |
| | QKGEDYVMNNSSIQLVEKDKMTKIFLLLSMDIPTQKRKLDSELVLGVDLGLN |
| | FPLYYATNQSANIHDHIGDKDIFLKERMVFQRRFKELQRLQCTQGGRGRKKK |
| | LEPLEKLRDKERNWVRTKNHIFSREVIKVALHLGAGTIHLENLHNFGKDGNG |
| | ELKNSKKFVFRNWSYFELQSMIEYKAKMEGITVKYVNPAYTSQTCSVCGMIG |
| | ERKEQAVFRCMNSSCLEYGKEVNADFNAARNIAKAKM |
| 34 | MPTITRKIELTLCTDGLSDDLRKDQWQLLYHINDNLYKAANNISSKLYLDEHV |
| CasM.279423 | ASMVRLKHAEYLGLIKELAKARKRADDEAVRDLCSKLAVAEQEMNEQAKAI |
| | CDYATEMSTQTLSYNFAKEIETNIFGQILTCLRQGVLLNFNSDARDVKRGERA |
| | IRNYKKGMPIPFPWNDTIKIVSEGDEFYLRWFSGLRFHLNFGKDRSNNRMIVR |
| | RCLKMEQDFDEEYKISNSSIQVAKRDGKQKLFLLLVVQIPQEQVVLNKKIVV |
| | GVDLGVNVPAYVATNITEERKAIGDREHFLNTRMQFQRRYKSLQRLKTTEGG |
| | RGRAKKLEPLERLRKAEHNWVHTQNHLFSREVVNFALQTQAATINMEDLSG |
| | FGKDNDGNADECKEFVLRNWSYYELQNMIVYKASKYGIRVQKIRPAYTSKT |
| | CSWCGHMGFREGVTFICENPDCKQFGEKVHADYNAARNIANSKEIIKNDE |
| 35 | MSKTVTKTVKIALICEHTNKYGEKVDYKDINKLLWKLQKQTRELKNKTIQLC |
| CasM.20054 | WEYNNFSCDYYKEHHEYPNMEDILKYKRINGFVENKLKTVNDLYSSNCSTTI |
| | LSTCNEFQNYRSEFLKGTRSINSYKSDQPLDLHKGAIKLEHDGKDFYVSLKLL |
| | KRSAFNAMEFKGSDIRFKLNVKDKDKSTLKILESCYDKIYSISASKMTYDRKA |
| | GKWFLLLAYSFTPAKTENLDPEKILGVDLGIKIPICASVYGDLDRLTIEGGKIEE |
| | FRRRVEARKRSLQKQGKQCGDGRIGHGTKKRIKPITDIGDKIARFRDTENHIY |
| | SRYLIEYAVKKGCGTIQMEKLEGITREKDIFLKNWTYFDLQKKIEYKAKEKGI |
| | KVVYIEPAYTSKRCSSCGFIDTDNRLDQAHFKCLKCGFNENADYNASQNIGIK |
| | NIDKIIKEEHKSASDKLTSE |
| 36 | VIILTKVVKLYLISEQINKEGQKIDYQRINSILWDLQKQTRDIKNRTVQLCWE |
| CasM.282673 | WMNFSSDYCKTQEEYPKERDILGYTLEGYVYDYFKTGYDLYTGNISTSSREV |
| | CSSFKNVKKEILKGERSILSYKANQPLDLHKKAISLEYDNFNFFVKLKLLNRT |
| | GKKKYDITEDINFKIQVNDKSTRTILERCYDKEYKISGSKLIYEKKKKLWRLN |
| | LCYSFENSQVETLEKDKILGIDLGIVYPLMASIYGEYDRFSIKGGEIEEFRRRTE |
| | ARKRSILQQTKYCGDGRIGHGRNKRTQPAYKINDKIARFRDTANHKYSRALIE |
| | YAVKKNCGIIQMENLTGISDNTDCFLKDWSYYDLQTKIENKAKEMGIKVVYI |
| | KAQYTSQRCSRCGYIDVNNRIRQALFKCQNCGYETNADYNASQNIGMYDIEN |
| | IIEETLKIQSANVKQS |
| 37 | MTKVTKVYLISEQIDKDGNKIDFKKISELLWNLQMQTRDIKNKCVQLCWEWL |
| CasM.282952 | NFSSDYYKKSEEYPKEKDTLGYTLSGFVYDRIKNGSDLYSSNLSTSSRDTCTA |
| | FSNYKKEMLKGERSVLSFKANQPLDIHNKAIKLSYENGNFFVALKMLNRAGK |
| | EKYGIKDDLRFRMQVRDKSVRTILERLMNDEYKVSASKLMYDKKKKLWKL |
| | NLCYSFDNHVISTLDTEKIMGVDLGVVYPIMASVNGDYARFSIKGGEIEAFRS |
| | RVEARRRSLLNQSRYCGDGRIGHGRKKRTEPATQIADKIARFRDTTNHKYSR |
| | ALIDYAIKNGCGTIQMEKLTGITSSAEHFLKEWSYFDLQTKIESKAKEAGIKVV |
| | YINPKFTSQRCNKCGYIHTDNRPVQARFCCQKCGYEENADYNASQNIGTKHI |
| | DVIIEETLKMQCEPETPTE |
| 38 | MNKVVKLALICEQSDKDNSPVDYKKINEILWELQKQTREIKNKAIQYCWEYN |
| CasM.283262 | NFSSDYYKKFNEYPKEKDILSYTLVGFVNDKFKTGNDLYSGNCSTTVRNACT |
| | EFKNSKKELIKGSRSIINYRSNQPLDIHNKCIRIEFENNCFYTYLKLLNRPAFKK |
| | YNFANTEIKFKILVRDNSTKTILERCISNEYEIAASKLLYDQKKKCWFLNLVYA |
| | FEIKSNNSLDPNKILGVDLGIHYPICASVYGSLDRFTIDGGEIDEFRRRVESRKIS |
| | MLKQGKNCGDGRIGHGIKARNKPVYNIEDKIARFRDTANHKYSRALIEYAVK |
| | HTCGTIQMEDLTGITDIANRFLKNWSYYDLQTKIEYKAKEAGINIVYIDPKNTS |
| | RRCSKCGYIDKENRETQSRFICLKCGFKENADYNASQNIGIKDIDKLIKEDVH |
| 39 | VTLLVKVVKIYLISEQFDKAGNQIDYKEVNKILWELQKQTREAKNKTVQLLW |
| CasM.284833 | EWNNFSSDYVKASGIYPKAKDIFGYSSVHGQANKELRTKLALNSSNLSTTTM |
| | DVCKIFNTYKKEVWEGKRSVPSYKSDQPLDLHKESIKLIYENNEFYVRLALLK |
| | KAEFAKYGFKDGFRFKMQVKDNSTKTILERCFDEVYKINASKLLYDQKKKK |
| | WKLNLSYSFDNKNISELDKEKILGVDVGVNCPLVASVFGDRDRFIIKGGEIEK |
| | FRKSVEARRRSMLEQTKYCGDGRIGHGRKKRTEPALNIGDKIARFRDTTNHK |
| | YSRALIEYAVKKGCGTIQMEKLTGITSKSDRFLKDWTYYDLQTKIENKAKEV |
| | GINVVYIAPKYTSQRCSKCGYIHKDNRPNQAKFRCLECDFESNADYNASQNIG |
| | IKNIDKIIEKDLQKQESEVQVNENK |
| 40 | MNKVVKLALICEQSDKNNSPVDYKKVNEILWELQKQTREIKNKTIQYCWEY |
| CasM.287700 | YNFSSDYYKKFNKYPKEKDILSYTLWGFINDKFKTGNDLYSGNCSATTKKVI |
| | KEFKNSKKELIRGSRSIINYKSNQPLNIHNKCIHLQFKNNNFYVSINLLNRRSFK |
| | KYNFANTAIKFKILVRDNSTKAILERCISNEYKISESQLIYNKKKKCWFLNLSY |
| | AFEIKSNNSLDPNKILGVDLGIHYPICASVYGSLDRFTIDGGEIDEFRRRVESRK |
| | ISMLKQGKNCGDGRIGHGIKARNKPVYNIEDKIARFRDTANHKYSRALIEYAV |
| | KNNCGTIQMEDLTGITDNANRFLKNWSYYDLQTKIEYKAKEASINVVYINPE |
| | NTSRRCSKCGYIDKENRKTQSSFICLKCGFKENADYNASQNISIKDIDKLIKED |
| | VH |
| 41 | VTLLVKVVKIHLISEQFDKAGNRIDYEEVNKILWELQKQTREAKNKTVQLLW |
| CasM.291507 | EWNNFSSDYVKASGIYPKAKDIFGYSSVHGQANKELRTKLALNSSNLSTTTM |
| | DVCKNFNTYKKEVWKGKRSVPSYKSDQPLDLHKDSIKLIYENNQFYVRLALL |
| | KKAEFAKYGFKDGFHFKMQVKDNSTKTILERCFDEVYKINASKLLYDQKKK |
| | KWKLNLSYSFDNKNISELDKEKILGVDVGVSYPLVASVFGDRDRFKIKGGEIE |
| | KFRKSVEARRRSMLEQTKYCGDGRIGHGRKKRTEPALNIGDKIARFRDTTNH |
| | KYSRALIEYAVKKGCGTIQMEKLTGITSKADRFLKDWTYYDLQTKIENKAKE |
| | VGINVVYIAPKYTSQRCSKCGYIHKDNRPNQAKFRCLECDFESNADYNASQNI |
| | GIKNIDKIIEKDLQKQESEVQVNENK |
| 42 | LIWKDALGGIILTKIVKLYLISEQIDKDGNRVDYKEINSILWNLQKQTRDIKNK |
| CasM.293410 | TVQLCWEWMNFSSDYYKKNELYPNEKEILNLTLRGYAYDHFKQGYDLYSSN |
| | ISVLTEAVCGAFKNAKKEMLNGEKSVLSYKAEQPLDIHKKCIKLEYDKNFYV |
| | KLKMLNKAGKKKYGIEDDLNFKIQVEDKSTRTILERCIDGEYVVSGSKLIYDK |
| | KKKLWKLNLCYSFKANEIESLDKNKILGIDLGIACPLMASVNGEFDRFSIKGG |
| | EIETFRKRIEARKRSVLHQTKYCGDGRIGHGRNKRTEPAYKINDKIARFRDTA |
| | NHKYSRALIDYAIRKNCGMIQMENLTGISDKKEHFLKEWSYYDLQTKIENKA |
| | KEKGIKIVYINPEYTSQRCSKCGYIDANNRELRAVFKCQKCGFEADADYNAS |
| | QNIGIKNIEDIIENTLKISSANEKQTKNT |
| 43 | VFYSTFLCYILTKYIDFSANECYNINTSSEVKQLMNKVVKLALICEQSDKDNSP |
| CasM.295105 | VDYKKINEILWELQKQTREIKNKAIQYCWEYNNFSSDYYKKFNEYPKEKDILS |
| | YTLVGFVNDKFKTGNDLYSGNCSTTVRNACTEFKNSKKELIKGSRSIINYRSN |
| | QPLDIHNKCIRIEFENNCFYTYLKLLNRPAFKKYNFANTEIKFKILVRDNSTKTI |
| | LERCISNEYEIAASKLLYDQKKKCWFLNLVYAFEIKSNNSLDPNKILGVDLGI |
| | HYPICASVYGSLDRFTIDGGEIDEFRRRVESRKISMLKQGKNCGDGRIGHGIKA |
| | RNKPVYNIEDKIARFRDTANHKYSRALIEYAVKHTCGTIQMEDLTGITDIANR |
| | FLKNWSYYDLQTKIEYKAKEAGINIVYIDPKNTSRRCSKCGYIDKENRETQSR |
| | FICLKCGFKENADYNASQNIGIKDIDKLIKEDVH |
| 44 | LISEQIDKDGNRVDYKEINSILWNLQKQTRDIKNKTVQLCWEWMNFSSDYYK |
| CasM.295187 | KNELYPNEKEILNLTLRGYAYDHFKQGYDLYSSNISVLTEAVCGAFKNAKKE |
| | MLNGEKSVLSYKAEQPLDIHKKCIKLEYDKNFYVKLKMLNKAGKKKYGIED |
| | DLNFKIQVEDKSTRTILERCIDGEYVVSGSKLIYDKKKKLWKLNLCYSFKANE |
| | IESLDKNKILGIDLGIACPLMASVNGEFDRFSIKGGEIETFRKRIEARKRSVLHQ |
| | TKYCGDGRIGHGRNKRTEPAYKINDKIARFRDTANHKYSRALIDYAIRKNCG |
| | MIQMENLTGISDNKEHFLKEWSYYDLQTKIENKAKEKGIKIVYINPEYTSQRC |
| | SKCGYIDANNRELRAVFKCQNCGFEADADYNASQNIGIKNIEDIIENTLKISSA |
| | NEKQTKNT |
| 45 | LVKVVKIYLISEQVDEQGKDVDYNTICGVLWDLQWETREIKNKTVQLCWEW |
| CasM.295929 | SGFSSDYYKKYGEYPKEKNLLDYTMGGFVYDKLKSKYHLYTANLSTTSQNT |
| | CGIFRTYKVDFVKGNRSVLSFKADQPLDVHKKSISIDRIDDNYFVKLKLLNKS |
| | GIQKYGIRDDFHFRMLVKDNSTKTILERCVGGDYKAAASKIIYDKKKKMWCL |
| | NLSYEFDVNTAKDLNKNRILGIDIGIVYPVVASVNGELDRFVIQGGEIETFRRR |
| | VENRKKSLLKQTKYCGDGRIGHGRNKRTEPVDIISDQIARFRNTANHKYSRA |
| | VIDYAVRKQCGTIQMENLKGITDKSDRFLKNWSYYDLQQKIEYKAKEKGINV |
| | VFINPKYTSQRCSRCGYIDSANRPKLPNQSKFLCIKCGFTENADYNASQNIALY |
| | NIEKLIDAEA |
| 202 | LHETEKSLKFAEKYIAMPTITRKIELTLCTEGLSDEQRKEQWGLLYHINDNLY |
| CasM.19498 | KAANNISSKLYLDEHVSSMVRMKHAEYLSLQKELARAEKQKVDDAIIVELTR |
| | KLAVAEKEMTDQELAICKYATEMSTNTLAYNFAKEIETKIFGQILACLENNAH |
| | ALFVDDSPNVRRGERAIRNYKKGMPIPFPWNRSIKIEADGGEFYLRWYNGLR |
| | FLLTFGKDRSNNRLIVKRCMKMDEVFEGEYKLCNSSIQLAKRDGKPKLFLLL |
| | VVNIPQEHVELNKNIVVGVDLGVNVPAYVATNITEERKAIGDREHFLNTRMT |
| | FQKRYKSLQRLKGTAGGKGRTKKLEPLERLRDAERNWVHTQNHLFSREVVN |
| | FAVQARAATINIEDLSGFGKDNDGNADEKKEFVLRNWSYYELQNMITYKAS |
| | KYGIKVEKIRPDYTSKTCSWCGQQGFREGVTFICENPECKQHGEKIHADYNA |
| | ARNIANSKDIIKKNE |
| 203 | MAETKRLQKVAKFQIVKPVNMSWDELGRMLRDVRYRLSRLANMAVSETYQ |
| CasM.19548 | NLHQRYRLKNQDAPKSLKIGQLSRNLRKILREEGVEEENLSKYSKTCVLPDTI |
| | TGAFSRYKLSSIDWRKVLTGKISVPNYKTNLSIPIRCDKPHQRRLELTETGEIE |
| | ADLMICNKPYPRVLLSTRTISDGQRTVLERLVSNKTNFLPGYRHRFFEVKEKK |
| | GKWELSVTYDFPKAEATRLHPDIIVGVDLGWSVPLYAAINNGYARIGYRKFE |
| | PLAKRIKHLQKQIKGRRFSTQKGGVKDLAQPTARAGHGRKRILKPIEKLEYKI |
| | DNAYTTLNHQLSHCVVEFAKNNGAGLIQIENLEGLKDDLSGTFIGQNWRYNQ |
| | LQNFIKYKADEAGIKVHPVNPCYTSRRCSHCGFIHISFDREYRDKNRKNGKAT |
| | MFECPKGCKPLNADYNAAKNLATFDIEEKIRLQCKQQSIEYKELPKD |
| 204 | MPGTEKRLQKVATFEIVKPVNMSWPEFGKMLRDVRYRYWRLANMAVCENY |
| CasM.19910 | MRFYQWRTQQTDANDRYKVKTLNRILRKMLIEEKNADEKELSRYSRDGAVS |
| | GYICGAFEKTKLSAVKSSSKWKKVIAGKESLPLFKKDLAIPINCSDHQPRLIER |
| | TQSGEYEVDLRICQQPYPRVLLSTAKISDGQKAILERLVSNETNSLPGYRHRFF |
| | EIKEKRNKWYLSVSYDFPKIDATRLHPNIIVGVDLGWSVPLYAAISNGYARIG |
| | YRKLKALGDRIKALQRQTIARRRSIQRTGEQDLSAPTARSGHGRKRILHPIEKL |
| | EGKIDNAYKTLNHQLSHCVIEFAKNHGAGLIQVENLKGLAEELSGTFIGQNW |
| | RYNQLQEFIKYKAKEAGIEVKEVNPCYTSRRCSECGFIHKEFTFEYRQANKKT |
| | DKATMFECPKCGYKAIADYNAARNLANPDIAEKIRLQCKEQGIEYKELPKD |
| 205 | MPTITRKIELHFCTEGLSDEKQKEQRQLLYHINDNLYKAANNISSKLYLDEHV |
| CasM.19948 | SSMVRLKHADYLSLQRELARAEKQKTPDDELITELSRKLSAAEKEMTDQELA |
| | ICKYATEMATSTLAYNFAKEMETEIFGQILACLENNAHAVFVDDSLSVKRGE |
| | RAIRNYKKGMPIPFPWNKNIKIETKDCEFYLRWYNGIRFRLHFGKDRSNNRLI |
| | VQRCLKLDDNFESEYKLCNSSIQLDKRDGKTKLFLLLVVNIPQEHVELNKNIV |
| | VGVDLGLNYPAYVATNSTEERKYIGDRDHFLKIRMQFQSRYKSLQRLKGTAG |
| | GKGRAKKLEPLERLRKAERNWVHTQNHLFSRDVVNFAVQTHAATIHMEDLS |
| | GFGKDNDGNADEKKEFVLRNWSYYELQSMIEYKAAKYGIKVEKIRPAYTSK |
| | TCSWCGQQGDRKSTTFICENPECKHYGESIHADYNAARNIANSKDIVKKNE |
| 206 | MSKITRKIEIIPDIDGITHEESNKKCYNTFYKFDRKLYKVANLLVSQLYGLDNL |
| CasM.265291 | LSLMRLQNDEYVKCQSKLSFKSITDATKEEIKKRMQEIDAELVSMKNDIAPKH |
| | PQTYSYRAVTSSEYAKDIPSDILNNLKQDVYQHFNENKKEQIRGERSLATYKK |
| | GMPIPFSFEKRHVIICDGDNYYLPWFEDTRFRLNFGRDRSNNRAIIDNCIKTKK |
| | YKLCAAAKIQLKERKLFLLITVDIPKAESVPVKGKVMGVDLGVINPAYVAVN |
| | DGPERSRIGNGEAFQKQRDVFRRRFRELQRSQLTQGGHGRKHKTKATEILRG |
| | KERNWVQTENHRISREIVNLASRWKVETIQMESLKGFGKNQEGEVEYNHKRL |
| | LGRWSYFELQKDIEYKAAMAGIAVQYVNPAYTSQTCHVCGQRGNRIERDTFI |
| | CTNPECTCYNQAQDADMNAAINIAKSKDVIK |
| 207 | MPTITRKIELTLCTDGLSDEERKAQWGLLYHINDNLYKAANNISSKLYLDEHV |
| CasM.270012 | SSMVRLKHAEYLSLQKELAKAERQKMPDVDVIEELRERLSAAEQEMSDQEL |
| | AICKYATEMSTNTLAYRFATEIETNIFGQILARLENNAQAVFLTDAPDVKRGE |
| | RAIRNYKKGMPIPFPWNNSIKIECEGGEFYLRWYSGLRFHFNFGKDRSGNRLI |
| | VQRCLKLDKEYDGEYKLCNSSIQMVKRDGSTKFFLLMVVNIPQEYVELNKHI |
| | VVGVDLGINVPAYVATNITPERKAIGDREHFLNTRMAFQRRYKSLQRLKTTA |
| | GGKGRTKKLEPLERLRQAEHNWVHTQNHLFSREVVNFALQTHAATIHLEDLS |
| | GFGKDSDGNADERKEFVLRNWSYYELQNMITYKAAKYGIRVEKIRPAFTSRT |
| | CSCCGHEGFREGVTFICENPECQQFGEKVHADYNAARNIANSKDIIKKNE |
| 208 | MPTITRKIELTLCTEGLSEEQRKEQWGLLYHINDNLYKAANNISSKLYLDDHV |
| CasM.272451 | SSMVRMKHAEYLSLLKELARAEKQKTPDADAIAELRKKVAAAEKEMTDQEH |
| | AICKYATEMSTETLAYKFATEIETNVFGQILACLKQAAQSNFKNDAKDVKRG |
| | ERAIRNYKKGMPIPFPWNDSLRIEKDNKDFYLRWYNGLRFLFNFGKDRSNNR |
| | LIVERCLKMDADYDGEYKLCNSSIQIAKREGKVKLFLLLVVSIPQEHVELNKK |
| | VVVGVDLGINVPAYVATNITEERKAIGDREHFLNTRMAFQRRYKSLQRLKGT |
| | AGGKGRTKKLEPLERLRKAEHNWVHTQNHLFSREVVDFAVKTHAATIHMED |
| | LSGFGKDNDGNADERKEFVLRNWSFYELQNMITYKAAKYGIKVEKIRPAYTS |
| | KTCSCCGRQGFRSGVTFICENPECKQYGEKVHADYNAARNIANSKEIIKKNE |
| 209 | MKNNVEEKRPDKEKRLTKVATFQIVKPVNMSWSEFGKMLRDVRYRLSRLAN |
| CasM.274429 | MAVSEAYQNLHQRYRLKNQNAPKSVKIGQISRDLRKILLEEGLEEENLSKYS |
| | KMCVLPDTITGAFSRYKLSTIDWRKVLTGKISIPNYKANLSIPIRCDKPQQRRL |
| | ERTETGEIEVDLMICNKPYPRVLLSTRTISDGQRSVLERLVLNNANSLPGYRH |
| | RIFEIKEKRNEWYLSVTYDFPKAETTKLHSDIIVGVDLGWSVPLYAAINNGYA |
| | RIGYKQLKPLGDSIKALQRQTIARRRSIQRGGTQDLAAPTARSGHGIKRILQPIE |
| | KLEGKIDNAYKTLNHQLSHCVIEFAKNHGAGVIQIENLKGLAEELSGTFIGQN |
| | WRYYQLQEFIKYKAKEAGIIVKEVNPFYTSRRCSECGYIHKDFTFEYRQANRK |
| | NGKSTMFECPKKEEKGCKPLNADYNAARNLATSDIEDKIRLQCKEQGIEYKEI |
| | KEK |
| 210 | VTLLVKVVKIHLISEQFDKAGNRIDYKEVNKILWELQKQTREAKNKTVQLLW |
| CasM.277378 | EWNNFSSDYVKASGIYPKAKDIFGYSSVHGQANKELRTKLILNSSNLSTTTMD |
| | VCKIFNTYKKEVWEGKRSVPSYKSDQPLDLHNDSIKLIYENKEFYVRLGLLNR |
| | AGFAKYGFKDGFRFKMQVKDNSTKTILERCFDGIYTIVASKLLYDQKKNRW |
| | KLNLSYSFDNKNISELDKEKILGVDVGVSCPLVASVFGDRDRFIIKGGEIEKFR |
| | KSVEARRRSMLEQTKYCGDGRIGHGRKKRTEPALNIGDKIARFRDTTNHKYS |
| | RALIEYAVKKGCGTIQMEKLTGITSKADRFLKDWTYYDLQTKIENKAKEVGI |
| | NVVYIAPKYTSQRCSKCGYIHKDNRPNQAKFRCLKCDFESNADYNASQNIGI |
| | KNIDKTIKKERKKQKSEAQVNEK |
| 211 | MAGKKKDKDVINKTLSVRIIRPRYSDDIEKEISDEKAKRKQDGKTGELDRAFF |
| CasM.280852 | SELKSRNPDIITNDELFPLFTEIQKNLTEIYNKSISLLYMKLIVEEEGGSTASALS |
| | AGPYKECKARFNSYISLGLRQKIQSNFRRKELKGFQVSLPTAKSDRFPIPFCHQ |
| | VENGKGGFKVYETGDDFIFEVPLIKYTATNKKSTSGKNYTKVQLNNPPVPMN |
| | VPLLLSTMRRRQTKKGMQWNKDEGTNAELRRVMSGEYKVSYAEIIRRTRFG |
| | KHDDWFVNFSIKFKNKTDELNQNVRGGIDIGVSNPLVCAVTNGLDRYIVANN |
| | DIMAFNERAMARRRTLLRKNRFKRSGHGAKNKLEPITVLTEKNERFRKSILQR |
| | WAREVAEFFKRTSASVVNMEDLSGITEREDFFSTKLRTTWNYRLMQTTIENK |
| | LKEYGIAVNYISPKYTSQTCHSCGKRNDYFTFSYRSENNYPPFECKECNKVKC |
| | NADFNAAKNIALKVVL |
| 212 | MPDTDKGKRLTKVATFQIVKPVNMSWNEFGKMLHDVRYRYWRLANMAVC |
| CasM.281050 | ENYMRFYRWRTQQTDTNDHYKVKIINGILRKMLIEEKNADEKELSRYSRDGA |
| | VSGYVYGAFTQTKLSAITSKSKWGEVIKGKSALPLFKRDTSIPIMCTDKKPSMI |
| | EKTASGEYEVDLRICLKDKQLRPNGYPSVLLSTTKISDGQKAVLERLVSNKTN |
| | SLPGYRHRFFEVKEKRGDWYLSVSYDFPQAEATRLHPDIIVGVDLGWSVPLY |
| | AAINNGYARIGWRKLEPLAKSIKHLQKQTIVRRRSFQKGGKKDLAASTARTG |
| | HGIKRILQPIEKLEGKIDNAYKTLNHQLSHCIIEFAKNHGAGVIQIENLKGLAEE |
| | LSGTFIGQNWRYHQLQEFIKYKAEEAGIAVKEVNPRYTSRRCSKCGYIHIGFD |
| | REYRDKNRKNGKSTMFECPECSKRIKDYKPLNADYNAAKNLATADIEEKIRL |
| | QCKEQGIEYKELPKD |
| 213 | MPTITRKIKLELCTKGLSEEERKAQWNLLYHINDNLYRSANNISSKLYLDEHV |
| CasM.285333 | SSLVWLKHKEHQTLKADLAKAKKQKIQDEKTIAELESRLKSCESEMSDQELAI |
| | CKYTDEMSSKTLSYKFATELELNIYAQILTQVQSKVYADFQNDQKDVRDGKR |
| | AIRTYKKGMPIPFPWRNNIRMEPVKKGREYEFYIKWYNDIRFQLIFGKDRSNN |
| | RLILQRCFKLDENCVEDYQMRTSSIKMVKGANGTELFLYLVVDIPQEKHILNN |
| | KIVVGVDLGINVPAYVATNVTDDRKAIGDREHFLNTRMAISKRFHSFQRLKG |
| | TTGGRGKTKKLEPLERLKEKERNWVHTQNHLFSRDVITFALHVKAATIQMED |
| | LSGYGKDDEGNVVEEKKFLLGKWSYYELQEMIKYKAKKVGMRVNFIKPAYS |
| | SQTCSWCGERGERNSTSFVCTNSECSHYGEDLHADYNAARNIARSKNIIRYE |
| 214 | MIITRKIQILFAAQGEEFKKDKDTLYKWSNIVHHASNIVASNKYVCDHLQGM |
| CasM.286285 | VYLTEEGKEAVSELSQKVDDIFNTSRMNTTYRMISSLYKGEIPTDILSCVNMQ |
| | VSKLYNKERKKMADGDRSLRSYRSNIPIPFSANSLMRKWKYADKEYSFDLFG |
| | IPFKVVLGKDKSNNRSILERLMDGTYKAATSSIKIQNCEDETGKKTRKFFLLLC |
| | VEIPDKSYAGREDNILFAELSIDHPLLVSFPIKKEESKPIPIGNKQSYLYKRLQIQ |
| | KGLDSCKASCKWNKGGRGRKRKMKSTERFKAKEHNFVDAYMHQISAALIKF |
| | AIKHDIGKLCLVDVDKKIKEAKESPFVLRNWSYYSLLTKIQYKAKMNGITVV |
| | MVDKNVL |
| 215 | MPTITRKIRLHLCTDGLSEEERKAQWKMLYRINDNLYRAANNISSKLYLDEHI |
| CasM.286678 | SSMVRLKHAEYTSLKTELLKAKKADDEETVAELEARINVLNAELSAQEEAICS |
| | YATEMATRTLAGKFASELDLNIYGQILAEVKSVVFKNFNSDSKDVREGKRSIR |
| | TYKKGMPIPFPWNKTIRLEAVKKESSSKHDEDEYEVYLNWYKSSRTEKKAIR |
| | FRLDFGKDKSNNQQIVKRCLNLDNTSSESYQLQTSSIQMKKGSEGAELYLLLV |
| | VNIPQDQHVLNKKIVVGVDLGINVPAYVATNCTEERKSIGDREHFLNARIAFH |
| | RRFHSFQKLKGTTGGRGRKKKLEPLERLREKERNWVHTQNHLISRDVINFAL |
| | QTKAATIQMEDLSGYGKDEEGNVKPENKFLQSRWSYFELQSMIKYKAAKCGI |
| | KVNLINPSYTSQTCSWCGQMGVRESTSFVCQNPECKKYGKDIHADYNAARNI |
| | ARSNKTVKNE |
| 216 | MPTITRKIELRLCTEGLSDEERKAQWMLLYHINDNLYRSANNISSKLYLDEHV |
| CasM.287128 | SSMVRLKHAEYQSTAAELLKAKKNNADEGTISTLEDKVETLKTEMSAQGIAI |
| | CNYATEMATRTLAGKFASELELNIYGQILAEVKNVVHTNFTNDAKEVREGKR |
| | SIRTYKKGMPIPFPWNKSIKIEPVKASSQNEGQDDYEFYLKWYNGLKFILHFG |
| | KDRSNNRQILKRCFGLDNLCNERYQMRTSSIQMKKGSNGMELYLLLVLSIPK |
| | EQHSLNKKVVVGVDLGINVPAYVATNCTEERRAIGDREQFLNTRMAIIRRKH |
| | SFQRLKGTAGGRGRKKKLDPLERLRETERNWVHTQNHLYSRDIIKFALETKA |
| | ATIQMEKLKGFGRDDNGNVIEEKKFLLGKWSYYELQNMIKYKAGKVGIKVN |
| | FIAPAYTSQTCSCCGVRDDRNRKSTSFICHNPDCQMYGKEIHADYNAARNIAR |
| | SKNVIKDE |
| 217 | MPAITRKIELTLCTEGLSEEQRKEQWGLLYHINDNLYKAANNISSKLYLDEHV |
| CasM.287826 | SSMVRMKHADYLSLLKELARAEKQKTPDDELIAELREKLSLAEQEMTDQELA |
| | ICNYATEMATSTLAYNFAKEIETEIFGQILACLENNAHAVFVDDSPTVRRGER |
| | AIRNYKKGMPIPFPWNKSIRIVEKDGEFYLRWYNGMRFLLTFGKDRSNNRIIM |
| | KRCLKMDQDFEGEYKLCNSSIQMVKREGKTKLFLLIVVNIPQEHVELNKNIV |
| | VGVDLGVNVPAYVATNITEERKAIGDREHFLNTRMQFQRRYKSLQRLKGTA |
| | GGKGRTKKLEPLERLRKAEHNWVHTQNHLFSREVVNFAVQTRAATIHMEDL |
| | SGFGKDNDGNADEQKEFVLRNWSFYELQNMIAYKAAKYGIKVEKVKPAYTS |
| | KTCSWCGQLGFRQGVTFICENPACKQCGEKVHADYNAARNIANSKDIIKKNE |
| 218 | MAGQRHTKVAKFQILKPAADMRWSELGRLLRDAQYRVYRLANLALSEKYL |
| CasM.287896 | RFHLFRTGQTESLPECRIGRLNRQLRQMLKDEGGADDSVLDRFSRTGALPDT |
| | VVGALWQYRLHALTKGEKWNKVTRGETALPTFRRSMALPIRCDKRIHHRLE |
| | RAALDSVELDLMICTRPYPRVILKTAKLDDGAAAILERLLDNEGQLLEGYRQR |
| | CFEVRYAEDEKAWWLHVTYDSPATPAPHLSKDIIVGVDLGFSCPMYVALSNG |
| | DARLGRRQFAALAARIRSLQTQVMARRRQMLSGGKASLSGDTARSGHGRKR |
| | KLLPIESLEGRINRAYTTLNHQLSISVVHFAVHHGAGVIQIENLEGLQNELTGT |
| | FLGQRWRYHQLQEFLNYKANEAGIEVRRVNPRYTSRRCSKCGYIHVDFNRAF |
| | RDAARQEGKVARFCCPKCEYEAHPDYNAARNLATVDIEGIIKVQCERQGIDR |
| | PSVENQDEVAK |
| 219 | MPTITRKIELTLCTEGLSDQERKDQWNLLYHINDNLYRAANNISSKLYLDDHV |
| CasM.287936 | GSMVRLKHAEYLSLLRALEKAKKQKAPDEEVIAELSQQVATAEQEMDEQAK |
| | AICQYATEMSTQTLSYRFATELETNIFGQILTCLRQGVFSTFNSDARDVKRGE |
| | RSIRTYKKGMPIPFPWNDSLRIGFEDGEFYLRWYNGLRFRFDFGKDRSNNRLI |
| | VQRCMKMDKDYEGDYKLCNSSIQMVKREGKPKFFLLLVVNIPQERVELNKN |
| | IVVGVDLGINAPAYVATNTTPERKQIGDREHFLNERMAFQRRFKSLQRLKSTT |
| | GGRGRAKKLEPLERLRKAEQNWVHTQNHLFSREVIDFAVKARAATIHMEDL |
| | SGFGKDRDGNADERKEFVLRNWSYYELQNMITYKAAKYGIKVEKIRPAYTS |
| | KTCSWCGHQGFREGITFICENPECKKFGEKEHADYNAARNIANSKEIIKNNEE |
| 220 | MPTITRKIELSLCTDGLSDEQLKEQRQLLYHINDNLYRAANNVSSKLYLDEHV |
| CasM.288450 | SSMVRLKHADYLSLLRDLARAEKQKSPDEALISELRSKLAAAQREMTEQELA |
| | ICRYATEMSTQSLSYRFVTEMETHIFAKILDCLKQGVYATFNSDARDVKRGER |
| | SIRNYKKGMPIPFAWSDSVRIEQEADEFYLRWYNGIRFRLVFGKDRSNNRLIV |
| | KRCLKLDKDYEGDYKLCNSSVQMVKREGKPKTFLLLVVKIPQEQVELNKKIV |
| | LGVDLGINYPVYAATNCTEERIYFGEREHFLNTRMQFQRRYKSLQRLKGTTG |
| | GKGRKKKLEPLERLRKAERNWVHTQNHLFSQKTVDFALQTHAATIHLEDLS |
| | GFGRDSDGSAEEKKEFVLRNWSYYELQQMITYKAAKYGIKVEKIRPAYTSQT |
| | CSWCGQRGFRQGVTFICENPECKKCGEKEQADYNAARNIAKSKDVIKDDDE |
| 221 | MSIVTRKIELIPDIENLTHEESNQRCYKLLYNIDKKLYKLANLLVCQLFGLDNL |
| CasM.288712 | LSLMRLQNDEYVKFQSKLASKSISKETQKNIKEHMKEIDKELLARKAEIAPKS |
| | PLTFAYRAIKGSLYAKDLPSDIFNTLKQDVFKHFNETKKEQLRGERSLATYKR |
| | GIPIPFSLMKKNVIVSEGDNYYLTWFEETRFKLNFGKDRSNNRAIIDNCLKTN |
| | KYKLCTAAKIQLKNKKLFFLVTVDIPETKNTIIKGKVMGVDLGVVHPAYVAV |
| | NDGPERSLIGDGDAFQKQRDVFRRRFKELQRCQLTQGGHGRKHKTKATEILR |
| | GKERNWVQTENHRISRKIVNLAIRWKVESIQMENLKGFGKDSEGEVETKHKR |
| | LLGRWSYFELQKDIEYKAQKAGIKVVYINPAYTSQTCHVCGKKGDRTERDTF |
| | ICLNTECSCYGKPQDADMNAAINIARSKNIVK |
| 222 | MPTITRKIELMLCSEGLSDEQRKEQWGLLYHINDNLYKAANNISSKLYLDEHV |
| CasM.289248 | SSMVRMKHAEYLSLLKELARAEKQQTPDEGLIAELSRKLSAAEKEMADQEL |
| | AICKYATEMSTQTLSYNFAKEIETNIFGQILTCLRQGVYATFNSDAKDVKRGE |
| | RAIRNYKKGMPIPFPWNKSLKIEAEGGDFYLRWYNGLRFLLTFGKDRSNNRM |
| | IVKRCMKMDEDFEGEYKLCNSSIQLAKRDGKPKLFLLLVVNIPQEHVELNKKI |
| | VVGVDLGVNVPAYVATNITEERKAIGDREHFLNTRMAFQRRYKSLQRLKGT |
| | AGGKGRTKKLEPLERLRDAERNWVHTQNHLFSREVVNFAVQARAATIHMED |
| | MSGFGKDKDGNADEKKEFVLRNWSFYELQNMIAYKSAKYGIKVVKIRPAYT |
| | SKTCSWCGQQGERKSTTFICENPECKHYGESIHADYNAARNIANSNDIVKENE |
| 223 | MVITRKIEVFVCESDNDLRRSYYEKLYDIRNIAQEAANRATSMLYAIDNLIPCL |
| CasM.289726 | DEDSRKLIQYIGAKGTPASRQNAAYTIMSHLYKDRMPGIMDMLSNLAQYVT |
| | KNYSEDRKRGMYKNALRSYKCSLPVPYQKKSFKGLRFNWYEDSDGDAHEG |
| | CFFSLAGVPLQMRFGRDRSNNRLIVERVISGEYKMCTSSLKFDGKKLFLLLCV |
| | DIPKQEANVDPKKTLYAYLGVMNPIICTCDVRAKQEYDSGYKCFEIGTKEEFN |
| | YRRRQIQEAVRRCQINNRYSSGGKGRKKKCQAIERWHEKEKNYVDTKLHTY |
| | SRMLVDLAVAHKCGTIVLLNQKKREDKAKDDNQNGEPFVLRNWSYYNLKD |
| | KIGYKCKLAGIKLVQDKEETEEE |
| 224 | MVITRKIEVFVCEDSKDLRKEYYDKIYKCRDIAVKTANLGVSHLFMLDNTTP |
| CasM.289802 | YLSDDDREKLTFLGCSGKKATKQNAPYVAASEKFKGQADMSMLSSVLQNVG |
| | KMYQDDKKKGMWSKSLRSYKANMPIPFKASCYRNLRFADYNDKEDKPHNG |
| | CFFTLMGIPFQCKFGKDRSGNRIIMQAVVDGKYKMCTSSLQIDGKKIFLLLCV |
| | DIPKKVVKLDESKTLYAFLGVMNPIVCTTDIKQKGDIDTDWKLWEIGTEAEFN |
| | YRRRQIQEAVKRCQVNNRYSRGGHGRFAKTKAIERWRAVERNYVDTKLHTY |
| | SKMLIDLAVKHKCGKIVLMNQLHREDAAKDDKFVLRNWSYHSLRTKIDYKA |
| | KMYGIKVEVEK |
| 225 | MPVITRKIKLNLCTEGLSEDERKAQWKMLYRINDNLYRAANNISSKLYLDEH |
| CasM.290380 | VSSMVRLKNAEYTSLVSDLMKAKKAEDEAAITDLEAKIESLKSEMTAQEEAI |
| | CCYATEMATRTLAGKFASELDLDIYGQILAEVKSVVFKNFNSDSKEVREGNR |
| | SIRTYKKGMPIPFPWNKTIRLEAVKKELSGKHDEDEYDFYLNWYKSSRTDKK |
| | AIRFRLYFGKDKSNNQQIVKRCLHLDSTSSENYQMQTSSIQMKKGPEGAELY |
| | LLLVVNIPQEQHALNKKIVVGVDLGINVPAYVATNCTEERKAIGDRDHFLNT |
| | RMAFSRRFHSFQRLKGTSGGKGRKKKLEPLERLREKERNWVHTQNHLISRDV |
| | INFALQVKAATIQMEDLSGYGKDEEGNVKPENKFLQSKWSYFELQSMIKYKA |
| | AKCGIKVNLIAPAYTSQTCSWCGQMGIRESTSFVCQNPECKQYGKDIHADYN |
| | AARNIARSNKIVKNE |
| 226 | MRISKTLSLRIVRPFYTPEVEAGIKAEKDKREAQGQTRSLDAKFFNELKKKHS |
| CasM.292901 | EIILSSEFYSLLSEVQRQLTSIYNHAMSNLYHKIIVEGEKTSTSKALSNIGYDEC |
| | KAIFPSYMALGLRQKIQSNFRRRDLKNFRMAVPTAKSDKFPIPIYRQVDGSKG |
| | GFKISENDGKDFIVELPLVDYVAEEVKTAKGRFTKINISKPPKIKNIPVILSTLR |
| | RRQSGQWFSDDGTNAEIRRVISGEYKVSWIEIVRRTRFGKHDDWFVNMVIKY |
| | DKPEEGLDSKVVGGIDVGVSSPLVCALNNSLDRYFVKSSDIIAFNKRAMARR |
| | RTLLRQNKYKRSGHGSKNKLEPITVLTEKNERFKKSIMQRWAKEVAEFFRGK |
| | GASVVRMEELSGLKEKDNFFSSYLRMYWNYGQLQQIIENKLKEYGIKVNYVS |
| | PKDTSKKCHSCTHINEFFTFEYRQKNNFPLFKCEKCGVECSADYNAAKNMAI |
| | A |
| 227 | MEEKTKRLQKVAKFQIVKPVNMTWVELGKMLRDVRYRLWRLANMAVCEN |
| CasM.293203 | YMRFYQWRIGKTDANENHKVKILNRRLREMIIEEKQADAKELMRYSRDGVV |
| | SGYICGAFEKIHLSAIKNKSKWREVIRGKSNLPLFKRDLPIPINCSDHKPSLIAK |
| | TESDEYEVDLRICQKPYPRVLLSTAKISGGERAILERLVSNKTNSLPGYRHRFF |
| | EIKEKPKGRWNLHVTYDFARSEATMLHSDIIVGVDLGWSVPLYAAVNKGHA |
| | RIGWRKLEPLAKRIRHLQKQVKARRLSVQKGGQRDLAAPTARAGHGRKRIL |
| | QPIEKLEGKIDDAYKTLNHQLSHCVIEFAKNNGAGVIQVENLEGLKDTLTGTF |
| | IGQNWRYNQLQNYIEYKAKEAGMELKKVNPCQTSQRCSNCGFIHRDFTFEYR |
| | QANKKNGKAAMFECPECSKKENYKPLNADYNAARNLATAGIEGKIRLQCEK |
| | QGIEYKGLPEE |
| 228 | MSKITRKIEIIPDIEGLTHDESNKKCYGAFYTFDKNLYKVANLLVSQLYGLDN |
| CasM.294190 | LLSLMRLQNDEYVKCQSKLSLKSTTDAEKENLKKRMKKIDAELVSIKNGMAP |
| | KHPQTFAYRAVTNCVYAKNIPSDILNTLKQDVYKHFNDTKKEQFLGERSLTT |
| | YKRGMPVPFSIEKKHAIVCDGDNYYLPWFEDTRFRLNFGRDKSNNRAIIDNCI |
| | KTKRYKLCAAAKIQLKDKKLFLLVTVDIPATETTSVKGKVMGVDLGVVNPA |
| | YVAVNDGPERSRIGNGEAFQKQRDVFRRRFRELQRSQLTQGGHGRKHKTKA |
| | TETLRGKERNWVQTENHRISREIVNLASRWKVECIQMESLKGYGKNQEGEVE |
| | DNHKRLLGRWSYFELQKDIEYKAAMVGIQVKYINPAYTSQTCHVCGQRGNR |
| | IERDTFICTNPECTCYNQAQDADMNAAINIAKSKDVVK |
| 229 | MPTITRKIEMKLCTEGLSDQERKDQWNLLYHINDNLYRAANNISSKLYLDDH |
| CasM.294406 | VLSMVRLKHAEYLGLLRALEKAKKQKIPDEEVIAELSQKVAAAEQEMDDQA |
| | KAICQYATEMSTQSLSYRFATELETGIFTKILDCLKQGVFATFNSDTRDVKRG |
| | ERSIRTYKKGMPIPFAWNDSLRIELEDGEFYLRWYNGLRFRFDFGKDRSNNRL |
| | IVRRCLNMDEDYEGDYKLCNSSIQMVKREGLAKFFLLMVVNIPQEQVELNKK |
| | IVVGVDLGINAPAYVATNITSERKQIGDREHFLNERMAFQRRFKSLQRLKGTT |
| | GGRGRAKKLEPLERLRKAEQNWVHTQNHLFSREVIDFAVKSRAATIHMEDLS |
| | GFGKDRDGNADDKKEFVLRNWSYYELQSMITYKAAKYGIKVEKIRPAYTSK |
| | TCSWCGHQGFREGITFICENPECKKYGEKEHADYNAARNIANSIEIVKNNEE |
| 230 | MKDYIRKTLSLRILRPYYGEEIEKEIAAAKKKSQAEGGDGALDNKFWDRLKA |
| CasM.294601 | EHPEIISSREFYDLLDAIQRETTLYYNRAISKLYHSLIVEREQVSTAKALSAGPY |
| | HEFREKFNAYISLGLREKIQSNFRRKELARYQVALPTAKSDTFPIPIYKGFDKN |
| | GKGGFKVREIENGDFVIDLPLMAYHRVGGKAGREYIELDRPPAVLNVPVILST |
| | SRRRANKTWFRDEGTDAEIRRVMAGEYKVSWVEILQRKRFGKPYGGWYVN |
| | FTIKYQPRDYGLDPKVKGGIDIGLSSPLVCAVTNSLARLTIRDNDLVAFNRKA |
| | MARRRTLLRQNRYKRSGHGSANKLKPIEALTEKNELYRKAIMRRWAREAAD |
| | FFRQHRAATVNMEDLTGIKDREDYFSQMLRCYWNYSQLQTMLENKLKEYGI |
| | AVKYIEPKDTSKTCHSCGHVNEYFDFNYRSAHKFPMFKCEKCGVECGADYN |
| | AARNIAQA |
| 231 | MPFKVLKLKIIKPVNMDWNELGQSIRDTRYRVYRLANLAVSEAYLAFHLWR |
| CasM.294655 | AGKTDAIPKATAGQLNRRLRDMLLEEARTKAVKDRKNTGEKGTEDDAKKA |
| | QKEMNKFSKTGALPDTVAGALFMYKVKGLISKGKWTQVIRGKSALPTFRNN |
| | MAIPIRCDKKTQRRLERTENGVELELMIRNKPYPRVLLGTQGIGEGAEAIIERL |
| | LSNESQAEQGYKQRYFEVREDVNRTWWLYVCYALPASTPPRLDPSKIVGVD |
| | LGFTCPMYAAISNGHARLGYRAFSSLAARVKALKLRTMRRRREIQRGGRTIV |
| | SGEAARSGHGRKRKLLGIEKLQGRVNQAYTTLNHQMSAAVVKFAIENGAGTI |
| | QVENLEGLREELSGTFLGQMWRYFQLQEFLQYKAEENGIVIRKVNPRYTSRR |
| | CSQCGHINKEFTRKARDRNAEGGYSAKFKCPDCEYEADADYNAAKNLAVDG |
| | IEGIIEKQCGSQGIVL |
| 232 | MFLYKELKTMAKTNAEEGKIENKEKRLTKVAKFQIVKPVNMTWPEFGKMLG |
| CasM.295201 | DVRYRLSRVANMAVTEKYLESQQKRTGQKIQRENTLVTIANRKLREMLKKE |
| | KVKEEELDRYSRDGAVSGYVTGPFEHNKLSAISKRFKEVLKGNMSLPNFKRE |
| | MAIPINCSNAKLSTIEKTETGEYVVDLRISQKPWPRVLLSTNRISNGQREILERL |
| | AANKTFSDDGYKHLFFEVKQQGKDWFLSVTYSFPKSEAPKLHKDIIVGVDLG |
| | WSVPLYAAVNKGYARIGWQKFRPLAERIKHLQKQVKARRITIQKGGQQDLA |
| | TPTARTGHGRKRILRPIEKLERKIENAYTTLNHQLSHCVIEFAKNNGAGVIQIE |
| | NLSGLANELSGTYIGQNWRYEQLQEYIRYKAEEAGIEVKHVNPCRTSQRCSE |
| | CGFINDKFNFEYRQANRNNGMSAMFECPECKKNKKDYKPINADYNAAKNLT |
| | TANIDEIIRLQCKKQGIEYKELPKD |
| 233 | MSKITRKIELIPDIENLTHEESNQRCYKVFYNIDNKLYKVANLLVCQLFGLDNL |
| CasM.296640 | LSLMRLQNDEYVKCQSKLASKSISEETKRDIKKRMEAIDKELLARKDEIAPKH |
| | PQTFAYRAIKDSDYAKDLPSDIFNTLKQDVFKHFNETKKEQLRGERSLTTYKR |
| | GIPVPFNLMKKNVIVSDGDNYYLTWFEETRFKLNFGKDRSNNRAIIDNCLKTN |
| | KYKLCTAAKIQLKNKKLFLLVTVDIPETKNKIIKGKVMGVDLGVVHPAYVAV |
| | NDGPERSLIGDGDAFQKQRDVFRRRFRELQRCQLTQGGHGRKHKTKATENL |
| | RGKERNWVQTENHRISREIVNLAIRWRVETIQMENLKGFGKDSDGDVETKHQ |
| | RLLGRWSYFELQKDIEYKAAMAGIKVVYVNPAYTSQTCHVCGERGDRTERD |
| | TFICTNTECDCYGKPQDADMNAAINIARSKNIVK |
| 234 | MTKVVKLPLICEQSDKDGNPIDYKKIYEILFELQRQTREIKNKSIQYCWEFSNF |
| CasM.296642 | SSDYYKQNHEYPKEKDILSYTLVGFVNDKFKTGNDLYSGNCSTTVRGACGEF |
| | KNSKTDFLKGTKSIINYKGNQPLDLHNKTIRFECIGKDYYAYLKLLNRPAFQR |
| | NNFSSSEIKFKVLVYDNSSKTIVERCIDNIYKISASKLIYNEKKKCWVLNLSYSF |
| | TNNNVCELDENKILGVDLGIHYPICASVNGERKFFKIDGGEIDHTRRKIEVRKK |
| | SLLKQGSSCGEGRIGHGIKTRNKPVYNIEDKIACFRDTANHKYSRALINYAVN |
| | NNCGIIQMEKLTGITADSDRFLKNWSYFDLQTKIEYKAKEAGITVVYIDPQYT |
| | SQRCSKCGYISKENRKVQAKFCCQKCGYEANADYNASQNIGIKDIDKIIKNTK |
| 235 | VPITKTISLRILRPYYPPEIEAKIKAEKEKRKENGDTGSLNSSYYRELKKEYPSII |
| CasM.298142 | INDEFFPLLSEMQRNITSIYNRTISHLYHRLIIKKESISTAKALSEGPYRDFKSTF |
| | NSYIALGLRQKVQSNFRKKDLMAFKIALPTAKSDKFPIPIYMQTNFKIKESPDS |
| | DFIIELPLVEYIAKETKGKNKMFTKVEILSPPKVKNIPVILSTRRRKESGQWFSD |
| | EGTNAEIRRIISGEYKVSWIEIVKRTRFGKHDWFVNMVISFEESQEGLDPDVIG |
| | GIDIGVSKPLICAINNSLDRYIVKGDDIIAFNRRALSRRRSLLRRNRLKRSGHGS |
| | RNKLEPITVLTEKNERFKKSIMQRWAKEVAEFFKSKRASIVQMEELTGIKERE |
| | DFFSKTLRMYWNYGQLQKTVENKLREYGIEVRYASPKDTSRRCHSCGHIND |
| | YFTFEFRQQNNFPLFKCMNCGIECSADYNAARNIAIAR |
| 236 | MNRIYQGRVSKVEIPDGKDEWKKLDDGESALWQHHQLFQDDVNYLLAAFA |
| CasM.298248 | ALVPTSCEDDIWKDYQAAIERSWESYTGRQGIWDRPFENACVIVGCKKDASF |
| | KEFRRKLNSLTGSKASEKQKFEALKQLFEPATEAAKKLKKHDEPVEESLKGK |
| | AKDLFGSTLVNLCAQKTKVTPRDVIAKQRNRASECTKKVNEGERLKWADVF |
| | YFKTDTSAAKWSREDAAKNIIQFLDKLLGEVEEKEKDAKTSDQKKKMADLA |
| | ERLEKQKKPLAAWCNNSKTDLPTTEPTRKGSGGYDLKAAVLFSLQPDLDGFR |
| | DAFLLFNQARLKEEFATTEKGDAAYIARMAGGVARPVFPFFCDVWAGKVND |
| | EKIGQGIWPDFEKQAFSEVFTKIGQFIVRGRKFELRLAIADQIIAKIETQKKSDA |
| | RLQAVERIAEDLADELPDTAVDENGQKRPYGIRERTLKGWRKVRPAWREAL |
| | KKTPNLTAEDLIKQKNRMQERQREKYGSASLFDRLAKEPEIWNHDDKEDAV |
| | ETWADYVENLEEKAHLETERLFAPAHATLSPRFFRWSETNNKEHLEASSPDV |
| | PFELKADALDLSKKEKSQIKIHFWSPRLWRDGLRGKKENLDKDEPDQNWMP |
| | PVLRAFVKARKWPCDKQSFAGASVRLAPRCKENIQLVFEPELHTEILSAKWK |
| | ENFPFSPAKNKESESVGLFWPRTKEDKVLWFDKGETRCLGVDLGLTNSAAW |
| | QILQATNKDATAKAPRLRHRLNPDSEKAAWFAHSITNGIVRVAGEDCWGWR |
| | KFAPDEKAKLRAELKKPAGKRNALCRKFLSLNREIEFETATHSFLPELSGSGG |
| | RNPTDDETKEAAEFFSTLKTKGFDITDRQPSWGKNLSFPKQNDELLWGLKRV |
| | RAQLFRLNRWSEQLGKERDSKPYQSAIEIIGNLRSDDPLIELATLKSEPKRLKS |
| | RIAELAGEYLDCFKTLLPRIADRILPWRRGHWSWKPCDNDWHRMELDASKP |
| | RPEALLAGQRGISLPRLNQLKDLRQLAQSLNHLCRRKQIKRNETVPEPFEDCR |
| | QAMEDAREDRAKKIAHEVFAIALGVELAPPPPDKQERKQTESLHGVYRCLER |
| | GPVNFIALENLGGYNPSAKQGRRENRQLSSWLKGRIHKILGELCEMVGMPIV |
| | LVNAEYTSRFSAKDHSPGFRAEEVQTDDSRRSFWQRKAKEEPSGWQNEFLC |
| | WLNKVPDGKSLLLPKKGGEFFVPLGEGTSLYHADLNAAYRIALRALAHRDR |
| | AELLGQTWIEKKPYLVDVAGVFPDSILRNGCAFKTISSSERLWEKVNGDLAM |
| | QRCREINLARFASWKIALPQQIISEALPPDEEDDIPM |
| 237 | MSEATKTLAYRYRLRLTPAQEDILDRSQEQLRLVWNHLVRSQHKVEHEWRH |
| CasM.298264 | GRAASIKNELLELSLAKNATGQAIPSARKITEERGVSMEEALRLMRQKFVEKV |
| | SAIPLRKKDGSRCLRIARRKMATEYAVTVVNAKFKHYYGLGARMCKVLRDK |
| | FQKCSDMWIKGKFRRPRFKRKGESVALQRQVQSNSPFKLKRFSDLSALGGQA |
| | LKKCEVIIHRPLPDSAEIKQIAVSGRRGQRHLIVMFKAASSDVAKNFPATNRT |
| | AGVDPGIKVALTITPLDSPDFGTSDKIEKQPDLARDACFLKRLRRLQRKHDRQ |
| | RRQNNPECFDEKGRWIKGKRLHNESKNMQRTQSRITAMNTHLAESRRDFYH |
| | NAACEILRSFDNVAVGKWRPAQTRQRKPTTPSPKGLGAARRATNRISYDHAI |
| | SLFISYLKDKAERSVTTKHVQEVSEFGSTRSCPKCGKLTGPVGTEGLAVRDW |
| | TCVNCNTTFQRDAASAWQIAKRFKAEVASTSQPAESQDSANSASVLTQV |
| 238 | MPTLTRKVELYVVGDKEEVSRVYDYIRLAMNATYKCFNECMTALYIAQVKE |
| CasM.298446 | DTKEDRKELNHLYSRQTYTKKETAFTNDIVFPEGLALAAYVNRMAQQKFVT |
| | SLKNGLMYGCVSLPTFKKDCAVPLHVKFVSLAGEKGTNTGFYHEYADVNDL |
| | VNALEYDNSPKVFLRFPNNITFGVVFGNPYRGREQRSVFSKIFLGEYKIQGSSI |
| | QINSRGKIILNLSMEVPKKKMEHIEGRVVGVDVGLAIPAMCAINDDDYTRSAI |
| | GNIDDFLKVRTQIQSQRRRLQKSLKNTSSGHGRTKKLKPLERIAEKERNFANT |
| | YNHMVSKRVVDFAVKNGASQINIEDLSGFAKDKNGKSVEDDNMKRVLSNW |
| | SYFELQQQIRYKAEQYDIKVRTVNPAYTSQTCSYCGQIGKRETQSKFVCTNPD |
| | CKCHKMYKKDWFNADFNAARNIALSTDYTDDEDGKKTKKKKSAKKKPEKK |
| | TEEA |
| 239 | MSGASGQITRDNKAQRSGPNKGEMSEDHSSTKRPKRVVKVAKYRIIKPVGEM |
| CasM.298612 | TWPELGEILRTVRYRVFRLGNLAVSEAYLNFHAFRTGKAEEFKSETIGKLSRR |
| | LRDMLISEGVKKEDIDRYSATGAVPDTVAGALGQYKVRGITSPAKWRQVIRG |
| | TVSLPTFRNDMAIPVRCDKPAQRRLEKAKSEEVEVDLMICRKPYPRVLIGTAD |
| | LGGGQQAILERLLDNKDNSSDGYRQRLFEIKQDTQSKKWFLFVTYDFPSSGA |
| | LPLDPNVAVGVDLGVSVPLYAAINNGHARLGRRQFQALGSRIRSLQTQVDAR |
| | RRAIQRGGRSDVSQSTARSGHGVRRKLQPTEKLRKRIDRSYSTLNHQLSAAV |
| | VEFAKNQGAGTVQMEDLGGLREELTGTFIGARWRYHQLQQFLEYKCDEAGI |
| | TLNKVNPMYTSRRCSECGFIDKDFDRAFRDRSRSDGRVARFICPECSYEADPD |
| | YNAARNIATLDIDKLIRVQCQKQGLKYDAL |
| 240 | MIITRKIELWLSEDDNELRKAKWSYLKELNDEVYRAANFIVNNQYFNEILENR |
| CasM.299584 | VIMQDTRLIDIDSEIRKLYKSREKNKEKIDELKKIKKIRYQEAKNFYQTSKQNV |
| | TYQLTSREFPNIPANIVTSLNASIIKTLKTEWNEIKSGKRAVRNYRKGMPIPFNF |
| | SSSQKWFENKGEDIFLNWLGGLKFKLFFGRDKSNNRAIVERAINKEYKYADS |
| | SIQLKDKKIFLLFVVDIPYEKANLNKNIAAGVDLGIAFPAFCALSEGYSRLSIG |
| | NKEDLLKVRLQMQSRRKRLQKALKITSGGKGRTKKLKALESLTNKEKNYVT |
| | TYNHKVSYQVIKFAKDNKAGIIKLEFLEGFGEDEKNKFILRNWSFYQLQKMIE |
| | YKAKREGIEVLYIDPYHTSQTCAICGNYEEGQREKQEDFICKNPECKNFEKIV |
| | NADYNAALNIAKSNKIVSSSEQCEYNKKHENNVL |
| 728 | MPTITRKIELTLCTEGLSDQERKDQWNLLYHINDNLYRAANNISSKLYLDDHV |
| CasM.286251 | GSMVRLKHAEYLSLLRALEKAKKQKAPDEEVIAELSQQVATAEQEMDEQAK |
| (D267A) | AICQYATEMSTQTLSYRFATELETNIFGQILTCLRQGVFSTFNSDARDVKRGE |
| | RSIRTYKKGMPIPFPWNDSLRIGFEDGEFYLRWYNGLRFRFDFGKDRSNNCLI |
| | VQRCMKMDKDYEGDYKLCNSSIQMVKREGKPKFFLLLVVNIPQERVELNKN |
| | IVVGVALGINAPAYVATNTTPERKQIGDREHFLNERMAFQRRFKSLQRLKGT |
| | TGGRGRAKKLEPLERLRKAEQNWVHTQNHLFSREVIDFAVKARAATIHMED |
| | LSGFGKDNDGNADERKEFVLRNWSYYELQNMITYKAAKYGIKVEKIRPAYT |
| | SKTCSWCGHQGFREGITFICENPECKKFGEKEHADYNAARNIANSKEIIKNNE |
| | E |
| 729 | MPTITRKIELTLLTEGLSEEQRKEQWGLLYHINDNLYKAANNISSKLYLDDHV |
| CasM.19952 | SSMVRMKHAEYLSLLKELARAEKQKTPDADAIAELRKKVAAAEKEMTDQEH |
| (D267A) | AICKYATEMSTQSLSYRFATELETNIFAKILDCLKQGVFATFNSDARDVKRGE |
| | RAIRNYKKGMPIPFAWDKSLRIEKDNKDFYLRWYNGLRFLFNFGKDRSNNRL |
| | IVERCLKMDADYDGEYKLCNSSIQIAKREGKTKLFLLLVVKIPQEHVELNKKV |
| | VVGVALGINVPAYVATNITEERKAIGDREHFLNSRMAFQRRYKSLQRLRGTA |
| | GGKGRAKKLEPLERLRKAEHNWVHTQNHLFSREVVDFAVKSHAATIHMEDL |
| | SGFGKDNDGNADERKEFVLRNWSYYELQNMIAYKAAKYGIKVEKIHPAYTS |
| | KTCSWCGQLGFREGVTFICENPECKQCGEKVHADYNAARNIANSKDIIKKNE |
| 730 | MPTITRKIELTLLTEGLSEEQRKEQWGLLYHINDNLYKAANNISSKLYLDDHV |
| CasM.19952 | SSMVRMKHAEYLSLLKELARAEKQKTPDADAIAELRKKVAAAEKEMTDQEH |
| (D267N) | AICKYATEMSTQSLSYRFATELETNIFAKILDCLKQGVFATFNSDARDVKRGE |
| | RAIRNYKKGMPIPFAWDKSLRIEKDNKDFYLRWYNGLRFLFNFGKDRSNNRL |
| | IVERCLKMDADYDGEYKLCNSSIQIAKREGKTKLFLLLVVKIPQEHVELNKKV |
| | VVGVNLGINVPAYVATNITEERKAIGDREHFLNSRMAFQRRYKSLQRLRGTA |
| | GGKGRAKKLEPLERLRKAEHNWVHTQNHLFSREVVDFAVKSHAATIHMEDL |
| | SGFGKDNDGNADERKEFVLRNWSYYELQNMIAYKAAKYGIKVEKIHPAYTS |
| | KTCSWCGQLGFREGVTFICENPECKQCGEKVHADYNAARNIANSKDIIKKNE |
| 731 | MPTITRKIELTLLTEGLSEEQRKEQWGLLYHINDNLYKAANNISSKLYLDDHV |
| CasM.19952 | SSMVRMKHAEYLSLLKELARAEKQKTPDADAIAELRKKVAAAEKEMTDQEH |
| (E363Q) | AICKYATEMSTQSLSYRFATELETNIFAKILDCLKQGVFATFNSDARDVKRGE |
| | RAIRNYKKGMPIPFAWDKSLRIEKDNKDFYLRWYNGLRFLFNFGKDRSNNRL |
| | IVERCLKMDADYDGEYKLCNSSIQIAKREGKTKLFLLLVVKIPQEHVELNKKV |
| | VVGVDLGINVPAYVATNITEERKAIGDREHFLNSRMAFQRRYKSLQRLRGTA |
| | GGKGRAKKLEPLERLRKAEHNWVHTQNHLFSREVVDFAVKSHAATIHMQDL |
| | SGFGKDNDGNADERKEFVLRNWSYYELQNMIAYKAAKYGIKVEKIHPAYTS |
| | KTCSWCGQLGFREGVTFICENPECKQCGEKVHADYNAARNIANSKDIIKKNE |

[0350] One technological advantage of CasM.19952 is its ability to create a blunt end cut or nearly blunt end cut, also referred to as a “short stagger” cut. This is demonstrated in Example 24. As a consequence of blunt cutting, there is a less likely chance of perfect repair as compared to a Cas nuclease that makes a staggered cut. The substantial overhangs of a staggered cut increases the chances that the cut will “spontaneously” repair, and decrease the chances of successful DNA editing, modification or donor insertion. In some instances, CasM.19952 cleaves double stranded DNA (dsDNA) resulting in two dsDNA ends. In some instances, at least one dsDNA end is a blunt end. A blunt end has no overhanging nucleotides. In some instances, at least one dsDNA end has at least one overhanging nucleotide. In some instances, at least one dsDNA end has less than 10, less than 9, less than 8, less than 7, less than 6, less than 5, less than 4, or less than 3 overhanging nucleotides. In some instances, at least one dsDNA end does not have more than two overhanging nucleotides. In some instances, neither dsDNA end has more than two overhanging nucleotides. Determination of the lack of or extent of an overhang can be determined by Sanger cutsite mapping, e.g., a forward primer to sequence (report on) the target strand and a reverse primer to sequence (report on) the non target strand.

[0351] In certain instances, compositions comprise an effector protein and an engineered guide nucleic acid, wherein the effector protein comprises an amino acid sequence that is at least 65%, at least 70%, at least 75%, at least 80%, at least 85%, at least 90%, at least 95%, at least 98%, at least 99%, or 100% identical to any one of SEQ ID NOs: 1-45. In some instances, the amino acid sequence of the effector protein is at least 65%, at least 70%, at least 75%, at least 80%, at least 85%, at least 90%, at least 95%, at least 97%, or at least 98%, at least 99%, or 100% identical to any one of SEQ ID NO: 1-SEQ ID NO: 45.

[0352] In certain instances, compositions comprise an effector protein and an engineered guide nucleic acid, wherein amino acid sequence of the effector protein is at least 65%, at least 70%, at least 75%, at least 80%, at least 85%, at least 90%, at least 95%, at least 97%, or at least 98%, at least 99%, or 100% identical to SEQ ID NO: 1. In certain instances, compositions comprise an effector protein and an engineered guide nucleic acid, wherein the amino acid sequence of the effector protein comprises at least about 200, at least about 220, at least about 240, at least about 260, at least about 280, at least about 300, at least about 320, at least about 340, at least about 360, at least about 380, or at least about 400 contiguous amino acids of SEQ ID NO: 1.

[0353] In certain instances, compositions comprise an effector protein and an engineered guide nucleic acid, wherein amino acid sequence of the effector protein is at least 65%, at least 70%, at least 75%, at least 80%, at least 85%, at least 90%, at least 95%, at least 97%, or at least 98%, at least 99%, or 100% identical to SEQ ID NO: 2. In certain instances, compositions comprise an effector protein and an engineered guide nucleic acid, wherein the amino acid sequence of the effector protein comprises at least about 200, at least about 220, at least about 240, at least about 260, at least about 280, at least about 300, at least about 320, at least about 340, at least about 360, at least about 380, or at least about 400 contiguous amino acids of SEQ ID NO: 2.

[0354] In certain instances, compositions comprise an effector protein and an engineered guide nucleic acid, wherein amino acid sequence of the effector protein is at least 65%, at least 70%, at least 75%, at least 80%, at least 85%, at least 90%, at least 95%, at least 97%, or at least 98%, at least 99%, or 100% identical to SEQ ID NO: 3. In certain instances, compositions comprise an effector protein and an engineered guide nucleic acid, wherein the amino acid sequence of the effector protein comprises at least about 200, at least about 220, at least about 240, at least about 260, at least about 280, at least about 300, at least about 320, at least about 340, at least about 360, at least about 380, or at least about 400 contiguous amino acids of SEQ ID NO: 3.

[0355] In certain instances, compositions comprise an effector protein and an engineered guide nucleic acid, wherein amino acid sequence of the effector protein is at least 65%, at least 70%, at least 75%, at least 80%, at least 85%, at least 90%, at least 95%, at least 97%, or at least 98%, at least 99%, or 100% identical to SEQ ID NO: 4. In certain instances, compositions comprise an effector protein and an engineered guide nucleic acid, wherein the amino acid sequence of the effector protein comprises at least about 200, at least about 220, at least about 240, at least about 260, at least about 280, at least about 300, at least about 320, at least about 340, at least about 360, at least about 380, or at least about 400 contiguous amino acids of SEQ ID NO: 4.

[0356] In certain instances, compositions comprise an effector protein and an engineered guide nucleic acid, wherein amino acid sequence of the effector protein is at least 65%, at least 70%, at least 75%, at least 80%, at least 85%, at least 90%, at least 95%, at least 97%, or at least 98%, at least 99%, or 100% identical to SEQ ID NO: 5. In certain instances, compositions comprise an effector protein and an engineered guide nucleic acid, wherein the amino acid sequence of the effector protein comprises at least about 200, at least about 220, at least about 240, at least about 260, at least about 280, at least about 300, at least about 320, at least about 340, at least about 360, at least about 380, or at least about 400 contiguous amino acids of SEQ ID NO: 5.

[0357] In certain instances, compositions comprise an effector protein and an engineered guide nucleic acid, wherein amino acid sequence of the effector protein is at least 65%, at least 70%, at least 75%, at least 80%, at least 85%, at least 90%, at least 95%, at least 97%, or at least 98%, at least 99%, or 100% identical to SEQ ID NO: 6. In certain instances, compositions comprise an effector protein and an engineered guide nucleic acid, wherein the amino acid sequence of the effector protein comprises at least about 200, at least about 220, at least about 240, at least about 260, at least about 280, at least about 300, at least about 320, at least about 340, at least about 360, at least about 380, or at least about 400 contiguous amino acids of SEQ ID NO: 6.

[0358] In certain instances, compositions comprise an effector protein and an engineered guide nucleic acid, wherein amino acid sequence of the effector protein is at least 65%, at least 70%, at least 75%, at least 80%, at least 85%, at least 90%, at least 95%, at least 97%, or at least 98%, at least 99%, or 100% identical to SEQ ID NO: 7. In certain instances, compositions comprise an effector protein and an engineered guide nucleic acid, wherein the amino acid sequence of the effector protein comprises at least about 200, at least about 220, at least about 240, at least about 260, at least about 280, at least about 300, at least about 320, at least about 340, at least about 360, at least about 380, or at least about 400 contiguous amino acids of SEQ ID NO: 7.

[0359] In certain instances, compositions comprise an effector protein and an engineered guide nucleic acid, wherein amino acid sequence of the effector protein is at least 65%, at least 70%, at least 75%, at least 80%, at least 85%, at least 90%, at least 95%, at least 97%, or at least 98%, at least 99%, or 100% identical to SEQ ID NO: 8. In certain instances, compositions comprise an effector protein and an engineered guide nucleic acid, wherein the amino acid sequence of the effector protein comprises at least about 200, at least about 220, at least about 240, at least about 260, at least about 280, at least about 300, at least about 320, at least about 340, at least about 360, at least about 380, or at least about 400 contiguous amino acids of SEQ ID NO: 8.

[0360] In certain instances, compositions comprise an effector protein and an engineered guide nucleic acid, wherein amino acid sequence of the effector protein is at least 65%, at least 70%, at least 75%, at least 80%, at least 85%, at least 90%, at least 95%, at least 97%, or at least 98%, at least 99%, or 100% identical to SEQ ID NO: 9. In certain instances, compositions comprise an effector protein and an engineered guide nucleic acid, wherein the amino acid sequence of the effector protein comprises at least about 200, at least about 220, at least about 240, at least about 260, at least about 280, at least about 300, at least about 320, at least about 340, at least about 360, at least about 380, or at least about 400 contiguous amino acids of SEQ ID NO: 9.

[0361] In certain instances, compositions comprise an effector protein and an engineered guide nucleic acid, wherein amino acid sequence of the effector protein is at least 65%, at least 70%, at least 75%, at least 80%, at least 85%, at least 90%, at least 95%, at least 97%, or at least 98%, at least 99%, or 100% identical to SEQ ID NO: 10. In certain instances, compositions comprise an effector protein and an engineered guide nucleic acid, wherein the amino acid sequence of the effector protein comprises at least about 200, at least about 220, at least about 240, at least about 260, at least about 280, at least about 300, at least about 320, at least about 340, at least about 360, at least about 380, or at least about 400 contiguous amino acids of SEQ ID NO: 10.

[0362] In certain instances, compositions comprise an effector protein and an engineered guide nucleic acid, wherein amino acid sequence of the effector protein is at least 65%, at least 70%, at least 75%, at least 80%, at least 85%, at least 90%, at least 95%, at least 97%, or at least 98%, at least 99%, or 100% identical to SEQ ID NO: 11. In certain instances, compositions comprise an effector protein and an engineered guide nucleic acid, wherein the amino acid sequence of the effector protein comprises at least about 200, at least about 220, at least about 240, at least about 260, at least about 280, at least about 300, at least about 320, at least about 340, at least about 360, at least about 380, or at least about 400 contiguous amino acids of SEQ ID NO: 11.

[0363] In certain instances, compositions comprise an effector protein and an engineered guide nucleic acid, wherein amino acid sequence of the effector protein is at least 65%, at least 70%, at least 75%, at least 80%, at least 85%, at least 90%, at least 95%, at least 97%, or at least 98%, at least 99%, or 100% identical to SEQ ID NO: 12. In certain instances, compositions comprise an effector protein and an engineered guide nucleic acid, wherein the amino acid sequence of the effector protein comprises at least about 200, at least about 220, at least about 240, at least about 260, at least about 280, at least about 300, at least about 320, at least about 340, at least about 360, at least about 380, or at least about 400 contiguous amino acids of SEQ ID NO: 12.

[0364] In certain instances, compositions comprise an effector protein and an engineered guide nucleic acid, wherein amino acid sequence of the effector protein is at least 65%, at least 70%, at least 75%, at least 80%, at least 85%, at least 90%, at least 95%, at least 97%, or at least 98%, at least 99%, or 100% identical to SEQ ID NO: 13. In certain instances, compositions comprise an effector protein and an engineered guide nucleic acid, wherein the amino acid sequence of the effector protein comprises at least about 200, at least about 220, at least about 240, at least about 260, at least about 280, at least about 300, at least about 320, at least about 340, at least about 360, at least about 380, or at least about 400 contiguous amino acids of SEQ ID NO: 13.

[0365] In certain instances, compositions comprise an effector protein and an engineered guide nucleic acid, wherein amino acid sequence of the effector protein is at least 65%, at least 70%, at least 75%, at least 80%, at least 85%, at least 90%, at least 95%, at least 97%, or at least 98%, at least 99%, or 100% identical to SEQ ID NO: 14. In certain instances, compositions comprise an effector protein and an engineered guide nucleic acid, wherein the amino acid sequence of the effector protein comprises at least about 200, at least about 220, at least about 240, at least about 260, at least about 280, at least about 300, at least about 320, at least about 340, at least about 360, at least about 380, or at least about 400 contiguous amino acids of SEQ ID NO: 14.

[0366] In certain instances, compositions comprise an effector protein and an engineered guide nucleic acid, wherein amino acid sequence of the effector protein is at least 65%, at least 70%, at least 75%, at least 80%, at least 85%, at least 90%, at least 95%, at least 97%, or at least 98%, at least 99%, or 100% identical to SEQ ID NO: 15. In certain instances, compositions comprise an effector protein and an engineered guide nucleic acid, wherein the amino acid sequence of the effector protein comprises at least about 200, at least about 220, at least about 240, at least about 260, at least about 280, at least about 300, at least about 320, at least about 340, at least about 360, at least about 380, or at least about 400 contiguous amino acids of SEQ ID NO: 15.

[0367] In certain instances, compositions comprise an effector protein and an engineered guide nucleic acid, wherein amino acid sequence of the effector protein is at least 65%, at least 70%, at least 75%, at least 80%, at least 85%, at least 90%, at least 95%, at least 97%, or at least 98%, at least 99%, or 100% identical to SEQ ID NO: 16. In certain instances, compositions comprise an effector protein and an engineered guide nucleic acid, wherein the amino acid sequence of the effector protein comprises at least about 200, at least about 220, at least about 240, at least about 260, at least about 280, at least about 300, at least about 320, at least about 340, at least about 360, at least about 380, or at least about 400 contiguous amino acids of SEQ ID NO: 16.

[0368] In certain instances, compositions comprise an effector protein and an engineered guide nucleic acid, wherein amino acid sequence of the effector protein is at least 65%, at least 70%, at least 75%, at least 80%, at least 85%, at least 90%, at least 95%, at least 97%, or at least 98%, at least 99%, or 100% identical to SEQ ID NO: 17. In certain instances, compositions comprise an effector protein and an engineered guide nucleic acid, wherein the amino acid sequence of the effector protein comprises at least about 200, at least about 220, at least about 240, at least about 260, at least about 280, at least about 300, at least about 320, at least about 340, at least about 360, at least about 380, or at least about 400 contiguous amino acids of SEQ ID NO: 17.

[0369] In certain instances, compositions comprise an effector protein and an engineered guide nucleic acid, wherein amino acid sequence of the effector protein is at least 65%, at least 70%, at least 75%, at least 80%, at least 85%, at least 90%, at least 95%, at least 97%, or at least 98%, at least 99%, or 100% identical to SEQ ID NO: 18. In certain instances, compositions comprise an effector protein and an engineered guide nucleic acid, wherein the amino acid sequence of the effector protein comprises at least about 200, at least about 220, at least about 240, at least about 260, at least about 280, at least about 300, at least about 320, at least about 340, at least about 360, at least about 380, or at least about 400 contiguous amino acids of SEQ ID NO: 18.

[0370] In certain instances, compositions comprise an effector protein and an engineered guide nucleic acid, wherein amino acid sequence of the effector protein is at least 65%, at least 70%, at least 75%, at least 80%, at least 85%, at least 90%, at least 95%, at least 97%, or at least 98%, at least 99%, or 100% identical to SEQ ID NO: 19. In certain instances, compositions comprise an effector protein and an engineered guide nucleic acid, wherein the amino acid sequence of the effector protein comprises at least about 200, at least about 220, at least about 240, at least about 260, at least about 280, at least about 300, at least about 320, at least about 340, at least about 360, at least about 380, or at least about 400 contiguous amino acids of SEQ ID NO: 19.

[0371] In certain instances, compositions comprise an effector protein and an engineered guide nucleic acid, wherein amino acid sequence of the effector protein is at least 65%, at least 70%, at least 75%, at least 80%, at least 85%, at least 90%, at least 95%, at least 97%, or at least 98%, at least 99%, or 100% identical to SEQ ID NO: 20. In certain instances, compositions comprise an effector protein and an engineered guide nucleic acid, wherein the amino acid sequence of the effector protein comprises at least about 200, at least about 220, at least about 240, at least about 260, at least about 280, at least about 300, at least about 320, at least about 340, at least about 360, at least about 380, or at least about 400 contiguous amino acids of SEQ ID NO: 20.

[0372] In certain instances, compositions comprise an effector protein and an engineered guide nucleic acid, wherein amino acid sequence of the effector protein is at least 65%, at least 70%, at least 75%, at least 80%, at least 85%, at least 90%, at least 95%, at least 97%, or at least 98%, at least 99%, or 100% identical to SEQ ID NO: 21. In certain instances, compositions comprise an effector protein and an engineered guide nucleic acid, wherein the amino acid sequence of the effector protein comprises at least about 200, at least about 220, at least about 240, at least about 260, at least about 280, at least about 300, at least about 320, at least about 340, at least about 360, at least about 380, or at least about 400 contiguous amino acids of SEQ ID NO: 21.

[0373] In certain instances, compositions comprise an effector protein and an engineered guide nucleic acid, wherein amino acid sequence of the effector protein is at least 65%, at least 70%, at least 75%, at least 80%, at least 85%, at least 90%, at least 95%, at least 97%, or at least 98%, at least 99%, or 100% identical to SEQ ID NO: 22. In certain instances, compositions comprise an effector protein and an engineered guide nucleic acid, wherein the amino acid sequence of the effector protein comprises at least about 200, at least about 220, at least about 240, at least about 260, at least about 280, at least about 300, at least about 320, at least about 340, at least about 360, at least about 380, or at least about 400 contiguous amino acids of SEQ ID NO: 22.

[0374] In certain instances, compositions comprise an effector protein and an engineered guide nucleic acid, wherein amino acid sequence of the effector protein is at least 65%, at least 70%, at least 75%, at least 80%, at least 85%, at least 90%, at least 95%, at least 97%, or at least 98%, at least 99%, or 100% identical to SEQ ID NO: 23. In certain instances, compositions comprise an effector protein and an engineered guide nucleic acid, wherein the amino acid sequence of the effector protein comprises at least about 200, at least about 220, at least about 240, at least about 260, at least about 280, at least about 300, at least about 320, at least about 340, at least about 360, at least about 380, or at least about 400 contiguous amino acids of SEQ ID NO: 23. In some instances, the engineered guide nucleic acid comprises a sequence that is at least at least 65%, at least 70%, at least 75%, at least 80%, at least 85%, at least 90%, at least 95%, at least 97%, or at least 98%, at least 99%, or 100% identical to the following sequence or an equal length portion thereof: TGGGGCAGTTGGTTGCCCTTAGCCTGAGGCATTTATTGCACTCGGGAAGTACCATTTCTC AGAAATGGTACATCCAAC (SEQ ID NO: 186). The equal length portion thereof may be about 40 nucleotides, about 50 nucleotides, about 60 nucleotides, or about 70 nucleotides.

[0375] In certain instances, compositions comprise an effector protein and an engineered guide nucleic acid, wherein amino acid sequence of the effector protein is at least 65%, at least 70%, at least 75%, at least 80%, at least 85%, at least 90%, at least 95%, at least 97%, or at least 98%, at least 99%, or 100% identical to SEQ ID NO: 24. In certain instances, compositions comprise an effector protein and an engineered guide nucleic acid, wherein the amino acid sequence of the effector protein comprises at least about 200, at least about 220, at least about 240, at least about 260, at least about 280, at least about 300, at least about 320, at least about 340, at least about 360, at least about 380, or at least about 400 contiguous amino acids of SEQ ID NO: 24.

[0376] In certain instances, compositions comprise an effector protein and an engineered guide nucleic acid, wherein amino acid sequence of the effector protein is at least 65%, at least 70%, at least 75%, at least 80%, at least 85%, at least 90%, at least 95%, at least 97%, or at least 98%, at least 99%, or 100% identical to SEQ ID NO: 25. In certain instances, compositions comprise an effector protein and an engineered guide nucleic acid, wherein the amino acid sequence of the effector protein comprises at least about 200, at least about 220, at least about 240, at least about 260, at least about 280, at least about 300, at least about 320, at least about 340, at least about 360, at least about 380, or at least about 400 contiguous amino acids of SEQ ID NO: 25.

[0377] In certain instances, compositions comprise an effector protein and an engineered guide nucleic acid, wherein amino acid sequence of the effector protein is at least 65%, at least 70%, at least 75%, at least 80%, at least 85%, at least 90%, at least 95%, at least 97%, or at least 98%, at least 99%, or 100% identical to SEQ ID NO: 26. In certain instances, compositions comprise an effector protein and an engineered guide nucleic acid, wherein the amino acid sequence of the effector protein comprises at least about 200, at least about 220, at least about 240, at least about 260, at least about 280, at least about 300, at least about 320, at least about 340, at least about 360, at least about 380, or at least about 400 contiguous amino acids of SEQ ID NO: 26.

[0378] In certain instances, compositions comprise an effector protein and an engineered guide nucleic acid, wherein amino acid sequence of the effector protein is at least 65%, at least 70%, at least 75%, at least 80%, at least 85%, at least 90%, at least 95%, at least 97%, or at least 98%, at least 99%, or 100% identical to SEQ ID NO: 27. In certain instances, compositions comprise an effector protein and an engineered guide nucleic acid, wherein the amino acid sequence of the effector protein comprises at least about 200, at least about 220, at least about 240, at least about 260, at least about 280, at least about 300, at least about 320, at least about 340, at least about 360, at least about 380, or at least about 400 contiguous amino acids of SEQ ID NO: 27.

[0379] In certain instances, compositions comprise an effector protein and an engineered guide nucleic acid, wherein amino acid sequence of the effector protein is at least 65%, at least 70%, at least 75%, at least 80%, at least 85%, at least 90%, at least 95%, at least 97%, or at least 98%, at least 99%, or 100% identical to SEQ ID NO: 28. In certain instances, compositions comprise an effector protein and an engineered guide nucleic acid, wherein the amino acid sequence of the effector protein comprises at least about 200, at least about 220, at least about 240, at least about 260, at least about 280, at least about 300, at least about 320, at least about 340, at least about 360, at least about 380, or at least about 400 contiguous amino acids of SEQ ID NO: 28.

[0380] In certain instances, compositions comprise an effector protein and an engineered guide nucleic acid, wherein amino acid sequence of the effector protein is at least 65%, at least 70%, at least 75%, at least 80%, at least 85%, at least 90%, at least 95%, at least 97%, or at least 98%, at least 99%, or 100% identical to SEQ ID NO: 29. In certain instances, compositions comprise an effector protein and an engineered guide nucleic acid, wherein the amino acid sequence of the effector protein comprises at least about 200, at least about 220, at least about 240, at least about 260, at least about 280, at least about 300, at least about 320, at least about 340, at least about 360, at least about 380, or at least about 400 contiguous amino acids of SEQ ID NO: 29.

[0381] In certain instances, compositions comprise an effector protein and an engineered guide nucleic acid, wherein amino acid sequence of the effector protein is at least 65%, at least 70%, at least 75%, at least 80%, at least 85%, at least 90%, at least 95%, at least 97%, or at least 98%, at least 99%, or 100% identical to SEQ ID NO: 30. In certain instances, compositions comprise an effector protein and an engineered guide nucleic acid, wherein the amino acid sequence of the effector protein comprises at least about 200, at least about 220, at least about 240, at least about 260, at least about 280, at least about 300, at least about 320, at least about 340, at least about 360, at least about 380, or at least about 400 contiguous amino acids of SEQ ID NO: 30.

[0382] In certain instances, compositions comprise an effector protein and an engineered guide nucleic acid, wherein amino acid sequence of the effector protein is at least 65%, at least 70%, at least 75%, at least 80%, at least 85%, at least 90%, at least 95%, at least 97%, or at least 98%, at least 99%, or 100% identical to SEQ ID NO: 31. In certain instances, compositions comprise an effector protein and an engineered guide nucleic acid, wherein the amino acid sequence of the effector protein comprises at least about 200, at least about 220, at least about 240, at least about 260, at least about 280, at least about 300, at least about 320, at least about 340, at least about 360, at least about 380, or at least about 400 contiguous amino acids of SEQ ID NO: 31.

[0383] In certain instances, compositions comprise an effector protein and an engineered guide nucleic acid, wherein amino acid sequence of the effector protein is at least 65%, at least 70%, at least 75%, at least 80%, at least 85%, at least 90%, at least 95%, at least 97%, or at least 98%, at least 99%, or 100% identical to SEQ ID NO: 32. In certain instances, compositions comprise an effector protein and an engineered guide nucleic acid, wherein the amino acid sequence of the effector protein comprises at least about 200, at least about 220, at least about 240, at least about 260, at least about 280, at least about 300, at least about 320, at least about 340, at least about 360, at least about 380, or at least about 400 contiguous amino acids of SEQ ID NO: 32.

[0384] In certain instances, compositions comprise an effector protein and an engineered guide nucleic acid, wherein amino acid sequence of the effector protein is at least 65%, at least 70%, at least 75%, at least 80%, at least 85%, at least 90%, at least 95%, at least 97%, or at least 98%, at least 99%, or 100% identical to SEQ ID NO: 33. In certain instances, compositions comprise an effector protein and an engineered guide nucleic acid, wherein the amino acid sequence of the effector protein comprises at least about 200, at least about 220, at least about 240, at least about 260, at least about 280, at least about 300, at least about 320, at least about 340, at least about 360, at least about 380, or at least about 400 contiguous amino acids of SEQ ID NO: 33.

[0385] In certain instances, compositions comprise an effector protein and an engineered guide nucleic acid, wherein amino acid sequence of the effector protein is at least 65%, at least 70%, at least 75%, at least 80%, at least 85%, at least 90%, at least 95%, at least 97%, or at least 98%, at least 99%, or 100% identical to SEQ ID NO: 34. In certain instances, compositions comprise an effector protein and an engineered guide nucleic acid, wherein the amino acid sequence of the effector protein comprises at least about 200, at least about 220, at least about 240, at least about 260, at least about 280, at least about 300, at least about 320, at least about 340, at least about 360, at least about 380, or at least about 400 contiguous amino acids of SEQ ID NO: 34.

[0386] In certain instances, compositions comprise an effector protein and an engineered guide nucleic acid, wherein amino acid sequence of the effector protein is at least 65%, at least 70%, at least 75%, at least 80%, at least 85%, at least 90%, at least 95%, at least 97%, or at least 98%, at least 99%, or 100% identical to SEQ ID NO: 35. In certain instances, compositions comprise an effector protein and an engineered guide nucleic acid, wherein the amino acid sequence of the effector protein comprises at least about 200, at least about 220, at least about 240, at least about 260, at least about 280, at least about 300, at least about 320, at least about 340, at least about 360, at least about 380, or at least about 400 contiguous amino acids of SEQ ID NO: 35.

[0387] In certain instances, compositions comprise an effector protein and an engineered guide nucleic acid, wherein amino acid sequence of the effector protein is at least 65%, at least 70%, at least 75%, at least 80%, at least 85%, at least 90%, at least 95%, at least 97%, or at least 98%, at least 99%, or 100% identical to SEQ ID NO: 36. In certain instances, compositions comprise an effector protein and an engineered guide nucleic acid, wherein the amino acid sequence of the effector protein comprises at least about 200, at least about 220, at least about 240, at least about 260, at least about 280, at least about 300, at least about 320, at least about 340, at least about 360, at least about 380, or at least about 400 contiguous amino acids of SEQ ID NO: 36.

[0388] In certain instances, compositions comprise an effector protein and an engineered guide nucleic acid, wherein amino acid sequence of the effector protein is at least 65%, at least 70%, at least 75%, at least 80%, at least 85%, at least 90%, at least 95%, at least 97%, or at least 98%, at least 99%, or 100% identical to SEQ ID NO: 37. In certain instances, compositions comprise an effector protein and an engineered guide nucleic acid, wherein the amino acid sequence of the effector protein comprises at least about 200, at least about 220, at least about 240, at least about 260, at least about 280, at least about 300, at least about 320, at least about 340, at least about 360, at least about 380, or at least about 400 contiguous amino acids of SEQ ID NO: 37.

[0389] In certain instances, compositions comprise an effector protein and an engineered guide nucleic acid, wherein amino acid sequence of the effector protein is at least 65%, at least 70%, at least 75%, at least 80%, at least 85%, at least 90%, at least 95%, at least 97%, or at least 98%, at least 99%, or 100% identical to SEQ ID NO: 38. In certain instances, compositions comprise an effector protein and an engineered guide nucleic acid, wherein the amino acid sequence of the effector protein comprises at least about 200, at least about 220, at least about 240, at least about 260, at least about 280, at least about 300, at least about 320, at least about 340, at least about 360, at least about 380, or at least about 400 contiguous amino acids of SEQ ID NO: 38.

[0390] In certain instances, compositions comprise an effector protein and an engineered guide nucleic acid, wherein amino acid sequence of the effector protein is at least 65%, at least 70%, at least 75%, at least 80%, at least 85%, at least 90%, at least 95%, at least 97%, or at least 98%, at least 99%, or 100% identical to SEQ ID NO: 39. In certain instances, compositions comprise an effector protein and an engineered guide nucleic acid, wherein the amino acid sequence of the effector protein comprises at least about 200, at least about 220, at least about 240, at least about 260, at least about 280, at least about 300, at least about 320, at least about 340, at least about 360, at least about 380, or at least about 400 contiguous amino acids of SEQ ID NO: 39.

[0391] In certain instances, compositions comprise an effector protein and an engineered guide nucleic acid, wherein amino acid sequence of the effector protein is at least 65%, at least 70%, at least 75%, at least 80%, at least 85%, at least 90%, at least 95%, at least 97%, or at least 98%, at least 99%, or 100% identical to SEQ ID NO: 40. In certain instances, compositions comprise an effector protein and an engineered guide nucleic acid, wherein the amino acid sequence of the effector protein comprises at least about 200, at least about 220, at least about 240, at least about 260, at least about 280, at least about 300, at least about 320, at least about 340, at least about 360, at least about 380, or at least about 400 contiguous amino acids of SEQ ID NO: 40.

[0392] In certain instances, compositions comprise an effector protein and an engineered guide nucleic acid, wherein amino acid sequence of the effector protein is at least 65%, at least 70%, at least 75%, at least 80%, at least 85%, at least 90%, at least 95%, at least 97%, or at least 98%, at least 99%, or 100% identical to SEQ ID NO: 41. In certain instances, compositions comprise an effector protein and an engineered guide nucleic acid, wherein the amino acid sequence of the effector protein comprises at least about 200, at least about 220, at least about 240, at least about 260, at least about 280, at least about 300, at least about 320, at least about 340, at least about 360, at least about 380, or at least about 400 contiguous amino acids of SEQ ID NO: 41.

[0393] In certain instances, compositions comprise an effector protein and an engineered guide nucleic acid, wherein amino acid sequence of the effector protein is at least 65%, at least 70%, at least 75%, at least 80%, at least 85%, at least 90%, at least 95%, at least 97%, or at least 98%, at least 99%, or 100% identical to SEQ ID NO: 42. In certain instances, compositions comprise an effector protein and an engineered guide nucleic acid, wherein the amino acid sequence of the effector protein comprises at least about 200, at least about 220, at least about 240, at least about 260, at least about 280, at least about 300, at least about 320, at least about 340, at least about 360, at least about 380, or at least about 400 contiguous amino acids of SEQ ID NO: 42.

[0394] In certain instances, compositions comprise an effector protein and an engineered guide nucleic acid, wherein amino acid sequence of the effector protein is at least 65%, at least 70%, at least 75%, at least 80%, at least 85%, at least 90%, at least 95%, at least 97%, or at least 98%, at least 99%, or 100% identical to SEQ ID NO: 43. In certain instances, compositions comprise an effector protein and an engineered guide nucleic acid, wherein the amino acid sequence of the effector protein comprises at least about 200, at least about 220, at least about 240, at least about 260, at least about 280, at least about 300, at least about 320, at least about 340, at least about 360, at least about 380, or at least about 400 contiguous amino acids of SEQ ID NO: 43.

[0395] In certain instances, compositions comprise an effector protein and an engineered guide nucleic acid, wherein amino acid sequence of the effector protein is at least 65%, at least 70%, at least 75%, at least 80%, at least 85%, at least 90%, at least 95%, at least 97%, or at least 98%, at least 99%, or 100% identical to SEQ ID NO: 44. In certain instances, compositions comprise an effector protein and an engineered guide nucleic acid, wherein the amino acid sequence of the effector protein comprises at least about 200, at least about 220, at least about 240, at least about 260, at least about 280, at least about 300, at least about 320, at least about 340, at least about 360, at least about 380, or at least about 400 contiguous amino acids of SEQ ID NO: 44.

[0396] In certain instances, compositions comprise an effector protein and an engineered guide nucleic acid, wherein amino acid sequence of the effector protein is at least 65%, at least 70%, at least 75%, at least 80%, at least 85%, at least 90%, at least 95%, at least 97%, or at least 98%, at least 99%, or 100% identical to SEQ ID NO: 45. In certain instances, compositions comprise an effector protein and an engineered guide nucleic acid, wherein the amino acid sequence of the effector protein comprises at least about 200, at least about 220, at least about 240, at least about 260, at least about 280, at least about 300, at least about 320, at least about 340, at least about 360, at least about 380, or at least about 400 contiguous amino acids of SEQ ID NO: 45.

[0397] In certain instances, compositions comprise an effector protein and an engineered guide nucleic acid, wherein amino acid sequence of the effector protein is at least 65%, at least 70%, at least 75%, at least 80%, at least 85%, at least 90%, at least 95%, at least 97%, or at least 98%, at least 99%, or 100% identical to SEQ ID NO: 202. In certain instances, compositions comprise an effector protein and an engineered guide nucleic acid, wherein the amino acid sequence of the effector protein comprises at least about 200, at least about 220, at least about 240, at least about 260, at least about 280, at least about 300, at least about 320, at least about 340, at least about 360, at least about 380, or at least about 400 contiguous amino acids of SEQ ID NO: 202.

[0398] In certain instances, compositions comprise an effector protein and an engineered guide nucleic acid, wherein amino acid sequence of the effector protein is at least 65%, at least 70%, at least 75%, at least 80%, at least 85%, at least 90%, at least 95%, at least 97%, or at least 98%, at least 99%, or 100% identical to SEQ ID NO: 203. In certain instances, compositions comprise an effector protein and an engineered guide nucleic acid, wherein the amino acid sequence of the effector protein comprises at least about 200, at least about 220, at least about 240, at least about 260, at least about 280, at least about 300, at least about 320, at least about 340, at least about 360, at least about 380, or at least about 400 contiguous amino acids of SEQ ID NO: 203.

[0399] In certain instances, compositions comprise an effector protein and an engineered guide nucleic acid, wherein amino acid sequence of the effector protein is at least 65%, at least 70%, at least 75%, at least 80%, at least 85%, at least 90%, at least 95%, at least 97%, or at least 98%, at least 99%, or 100% identical to SEQ ID NO: 204. In certain instances, compositions comprise an effector protein and an engineered guide nucleic acid, wherein the amino acid sequence of the effector protein comprises at least about 200, at least about 220, at least about 240, at least about 260, at least about 280, at least about 300, at least about 320, at least about 340, at least about 360, at least about 380, or at least about 400 contiguous amino acids of SEQ ID NO: 204.

[0400] In certain instances, compositions comprise an effector protein and an engineered guide nucleic acid, wherein amino acid sequence of the effector protein is at least 65%, at least 70%, at least 75%, at least 80%, at least 85%, at least 90%, at least 95%, at least 97%, or at least 98%, at least 99%, or 100% identical to SEQ ID NO: 205. In certain instances, compositions comprise an effector protein and an engineered guide nucleic acid, wherein the amino acid sequence of the effector protein comprises at least about 200, at least about 220, at least about 240, at least about 260, at least about 280, at least about 300, at least about 320, at least about 340, at least about 360, at least about 380, or at least about 400 contiguous amino acids of SEQ ID NO: 205.

[0401] In certain instances, compositions comprise an effector protein and an engineered guide nucleic acid, wherein amino acid sequence of the effector protein is at least 65%, at least 70%, at least 75%, at least 80%, at least 85%, at least 90%, at least 95%, at least 97%, or at least 98%, at least 99%, or 100% identical to SEQ ID NO: 206. In certain instances, compositions comprise an effector protein and an engineered guide nucleic acid, wherein the amino acid sequence of the effector protein comprises at least about 200, at least about 220, at least about 240, at least about 260, at least about 280, at least about 300, at least about 320, at least about 340, at least about 360, at least about 380, or at least about 400 contiguous amino acids of SEQ ID NO: 206.

[0402] In certain instances, compositions comprise an effector protein and an engineered guide nucleic acid, wherein amino acid sequence of the effector protein is at least 65%, at least 70%, at least 75%, at least 80%, at least 85%, at least 90%, at least 95%, at least 97%, or at least 98%, at least 99%, or 100% identical to SEQ ID NO: 207. In certain instances, compositions comprise an effector protein and an engineered guide nucleic acid, wherein the amino acid sequence of the effector protein comprises at least about 200, at least about 220, at least about 240, at least about 260, at least about 280, at least about 300, at least about 320, at least about 340, at least about 360, at least about 380, or at least about 400 contiguous amino acids of SEQ ID NO: 207.

[0403] In certain instances, compositions comprise an effector protein and an engineered guide nucleic acid, wherein amino acid sequence of the effector protein is at least 65%, at least 70%, at least 75%, at least 80%, at least 85%, at least 90%, at least 95%, at least 97%, or at least 98%, at least 99%, or 100% identical to SEQ ID NO: 208. In certain instances, compositions comprise an effector protein and an engineered guide nucleic acid, wherein the amino acid sequence of the effector protein comprises at least about 200, at least about 220, at least about 240, at least about 260, at least about 280, at least about 300, at least about 320, at least about 340, at least about 360, at least about 380, or at least about 400 contiguous amino acids of SEQ ID NO: 208.

[0404] In certain instances, compositions comprise an effector protein and an engineered guide nucleic acid, wherein amino acid sequence of the effector protein is at least 65%, at least 70%, at least 75%, at least 80%, at least 85%, at least 90%, at least 95%, at least 97%, or at least 98%, at least 99%, or 100% identical to SEQ ID NO: 209. In certain instances, compositions comprise an effector protein and an engineered guide nucleic acid, wherein the amino acid sequence of the effector protein comprises at least about 200, at least about 220, at least about 240, at least about 260, at least about 280, at least about 300, at least about 320, at least about 340, at least about 360, at least about 380, or at least about 400 contiguous amino acids of SEQ ID NO: 209.

[0405] In certain instances, compositions comprise an effector protein and an engineered guide nucleic acid, wherein amino acid sequence of the effector protein is at least 65%, at least 70%, at least 75%, at least 80%, at least 85%, at least 90%, at least 95%, at least 97%, or at least 98%, at least 99%, or 100% identical to SEQ ID NO: 210. In certain instances, compositions comprise an effector protein and an engineered guide nucleic acid, wherein the amino acid sequence of the effector protein comprises at least about 200, at least about 220, at least about 240, at least about 260, at least about 280, at least about 300, at least about 320, at least about 340, at least about 360, at least about 380, or at least about 400 contiguous amino acids of SEQ ID NO: 210.

[0406] In certain instances, compositions comprise an effector protein and an engineered guide nucleic acid, wherein amino acid sequence of the effector protein is at least 65%, at least 70%, at least 75%, at least 80%, at least 85%, at least 90%, at least 95%, at least 97%, or at least 98%, at least 99%, or 100% identical to SEQ ID NO: 211. In certain instances, compositions comprise an effector protein and an engineered guide nucleic acid, wherein the amino acid sequence of the effector protein comprises at least about 200, at least about 220, at least about 240, at least about 260, at least about 280, at least about 300, at least about 320, at least about 340, at least about 360, at least about 380, or at least about 400 contiguous amino acids of SEQ ID NO: 211.

[0407] In certain instances, compositions comprise an effector protein and an engineered guide nucleic acid, wherein amino acid sequence of the effector protein is at least 65%, at least 70%, at least 75%, at least 80%, at least 85%, at least 90%, at least 95%, at least 97%, or at least 98%, at least 99%, or 100% identical to SEQ ID NO: 212. In certain instances, compositions comprise an effector protein and an engineered guide nucleic acid, wherein the amino acid sequence of the effector protein comprises at least about 200, at least about 220, at least about 240, at least about 260, at least about 280, at least about 300, at least about 320, at least about 340, at least about 360, at least about 380, or at least about 400 contiguous amino acids of SEQ ID NO: 212.

[0408] In certain instances, compositions comprise an effector protein and an engineered guide nucleic acid, wherein amino acid sequence of the effector protein is at least 65%, at least 70%, at least 75%, at least 80%, at least 85%, at least 90%, at least 95%, at least 97%, or at least 98%, at least 99%, or 100% identical to SEQ ID NO: 213. In certain instances, compositions comprise an effector protein and an engineered guide nucleic acid, wherein the amino acid sequence of the effector protein comprises at least about 200, at least about 220, at least about 240, at least about 260, at least about 280, at least about 300, at least about 320, at least about 340, at least about 360, at least about 380, or at least about 400 contiguous amino acids of SEQ ID NO: 213.

[0409] In certain instances, compositions comprise an effector protein and an engineered guide nucleic acid, wherein amino acid sequence of the effector protein is at least 65%, at least 70%, at least 75%, at least 80%, at least 85%, at least 90%, at least 95%, at least 97%, or at least 98%, at least 99%, or 100% identical to SEQ ID NO: 214. In certain instances, compositions comprise an effector protein and an engineered guide nucleic acid, wherein the amino acid sequence of the effector protein comprises at least about 200, at least about 220, at least about 240, at least about 260, at least about 280, at least about 300, at least about 320, at least about 340, at least about 360, at least about 380, or at least about 400 contiguous amino acids of SEQ ID NO: 214.

[0410] In certain instances, compositions comprise an effector protein and an engineered guide nucleic acid, wherein amino acid sequence of the effector protein is at least 65%, at least 70%, at least 75%, at least 80%, at least 85%, at least 90%, at least 95%, at least 97%, or at least 98%, at least 99%, or 100% identical to SEQ ID NO: 215. In certain instances, compositions comprise an effector protein and an engineered guide nucleic acid, wherein the amino acid sequence of the effector protein comprises at least about 200, at least about 220, at least about 240, at least about 260, at least about 280, at least about 300, at least about 320, at least about 340, at least about 360, at least about 380, or at least about 400 contiguous amino acids of SEQ ID NO: 215.

[0411] In certain instances, compositions comprise an effector protein and an engineered guide nucleic acid, wherein amino acid sequence of the effector protein is at least 65%, at least 70%, at least 75%, at least 80%, at least 85%, at least 90%, at least 95%, at least 97%, or at least 98%, at least 99%, or 100% identical to SEQ ID NO: 216. In certain instances, compositions comprise an effector protein and an engineered guide nucleic acid, wherein the amino acid sequence of the effector protein comprises at least about 200, at least about 220, at least about 240, at least about 260, at least about 280, at least about 300, at least about 320, at least about 340, at least about 360, at least about 380, or at least about 400 contiguous amino acids of SEQ ID NO: 216.

[0412] In certain instances, compositions comprise an effector protein and an engineered guide nucleic acid, wherein amino acid sequence of the effector protein is at least 65%, at least 70%, at least 75%, at least 80%, at least 85%, at least 90%, at least 95%, at least 97%, or at least 98%, at least 99%, or 100% identical to SEQ ID NO: 217. In certain instances, compositions comprise an effector protein and an engineered guide nucleic acid, wherein the amino acid sequence of the effector protein comprises at least about 200, at least about 220, at least about 240, at least about 260, at least about 280, at least about 300, at least about 320, at least about 340, at least about 360, at least about 380, or at least about 400 contiguous amino acids of SEQ ID NO: 217.

[0413] In certain instances, compositions comprise an effector protein and an engineered guide nucleic acid, wherein amino acid sequence of the effector protein is at least 65%, at least 70%, at least 75%, at least 80%, at least 85%, at least 90%, at least 95%, at least 97%, or at least 98%, at least 99%, or 100% identical to SEQ ID NO: 218. In certain instances, compositions comprise an effector protein and an engineered guide nucleic acid, wherein the amino acid sequence of the effector protein comprises at least about 200, at least about 220, at least about 240, at least about 260, at least about 280, at least about 300, at least about 320, at least about 340, at least about 360, at least about 380, or at least about 400 contiguous amino acids of SEQ ID NO: 218.

[0414] In certain instances, compositions comprise an effector protein and an engineered guide nucleic acid, wherein amino acid sequence of the effector protein is at least 65%, at least 70%, at least 75%, at least 80%, at least 85%, at least 90%, at least 95%, at least 97%, or at least 98%, at least 99%, or 100% identical to SEQ ID NO: 219. In certain instances, compositions comprise an effector protein and an engineered guide nucleic acid, wherein the amino acid sequence of the effector protein comprises at least about 200, at least about 220, at least about 240, at least about 260, at least about 280, at least about 300, at least about 320, at least about 340, at least about 360, at least about 380, or at least about 400 contiguous amino acids of SEQ ID NO: 219.

[0415] In certain instances, compositions comprise an effector protein and an engineered guide nucleic acid, wherein amino acid sequence of the effector protein is at least 65%, at least 70%, at least 75%, at least 80%, at least 85%, at least 90%, at least 95%, at least 97%, or at least 98%, at least 99%, or 100% identical to SEQ ID NO: 220. In certain instances, compositions comprise an effector protein and an engineered guide nucleic acid, wherein the amino acid sequence of the effector protein comprises at least about 200, at least about 220, at least about 240, at least about 260, at least about 280, at least about 300, at least about 320, at least about 340, at least about 360, at least about 380, or at least about 400 contiguous amino acids of SEQ ID NO: 220.

[0416] In certain instances, compositions comprise an effector protein and an engineered guide nucleic acid, wherein amino acid sequence of the effector protein is at least 65%, at least 70%, at least 75%, at least 80%, at least 85%, at least 90%, at least 95%, at least 97%, or at least 98%, at least 99%, or 100% identical to SEQ ID NO: 221. In certain instances, compositions comprise an effector protein and an engineered guide nucleic acid, wherein the amino acid sequence of the effector protein comprises at least about 200, at least about 220, at least about 240, at least about 260, at least about 280, at least about 300, at least about 320, at least about 340, at least about 360, at least about 380, or at least about 400 contiguous amino acids of SEQ ID NO: 221.

[0417] In certain instances, compositions comprise an effector protein and an engineered guide nucleic acid, wherein amino acid sequence of the effector protein is at least 65%, at least 70%, at least 75%, at least 80%, at least 85%, at least 90%, at least 95%, at least 97%, or at least 98%, at least 99%, or 100% identical to SEQ ID NO: 222. In certain instances, compositions comprise an effector protein and an engineered guide nucleic acid, wherein the amino acid sequence of the effector protein comprises at least about 200, at least about 220, at least about 240, at least about 260, at least about 280, at least about 300, at least about 320, at least about 340, at least about 360, at least about 380, or at least about 400 contiguous amino acids of SEQ ID NO: 222.

[0418] In certain instances, compositions comprise an effector protein and an engineered guide nucleic acid, wherein amino acid sequence of the effector protein is at least 65%, at least 70%, at least 75%, at least 80%, at least 85%, at least 90%, at least 95%, at least 97%, or at least 98%, at least 99%, or 100% identical to SEQ ID NO: 223. In certain instances, compositions comprise an effector protein and an engineered guide nucleic acid, wherein the amino acid sequence of the effector protein comprises at least about 200, at least about 220, at least about 240, at least about 260, at least about 280, at least about 300, at least about 320, at least about 340, at least about 360, at least about 380, or at least about 400 contiguous amino acids of SEQ ID NO: 223.

[0419] In certain instances, compositions comprise an effector protein and an engineered guide nucleic acid, wherein amino acid sequence of the effector protein is at least 65%, at least 70%, at least 75%, at least 80%, at least 85%, at least 90%, at least 95%, at least 97%, or at least 98%, at least 99%, or 100% identical to SEQ ID NO: 224. In certain instances, compositions comprise an effector protein and an engineered guide nucleic acid, wherein the amino acid sequence of the effector protein comprises at least about 200, at least about 220, at least about 240, at least about 260, at least about 280, at least about 300, at least about 320, at least about 340, at least about 360, at least about 380, or at least about 400 contiguous amino acids of SEQ ID NO: 224.

[0420] In certain instances, compositions comprise an effector protein and an engineered guide nucleic acid, wherein amino acid sequence of the effector protein is at least 65%, at least 70%, at least 75%, at least 80%, at least 85%, at least 90%, at least 95%, at least 97%, or at least 98%, at least 99%, or 100% identical to SEQ ID NO: 225. In certain instances, compositions comprise an effector protein and an engineered guide nucleic acid, wherein the amino acid sequence of the effector protein comprises at least about 200, at least about 220, at least about 240, at least about 260, at least about 280, at least about 300, at least about 320, at least about 340, at least about 360, at least about 380, or at least about 400 contiguous amino acids of SEQ ID NO: 225.

[0421] In certain instances, compositions comprise an effector protein and an engineered guide nucleic acid, wherein amino acid sequence of the effector protein is at least 65%, at least 70%, at least 75%, at least 80%, at least 85%, at least 90%, at least 95%, at least 97%, or at least 98%, at least 99%, or 100% identical to SEQ ID NO: 226. In certain instances, compositions comprise an effector protein and an engineered guide nucleic acid, wherein the amino acid sequence of the effector protein comprises at least about 200, at least about 220, at least about 240, at least about 260, at least about 280, at least about 300, at least about 320, at least about 340, at least about 360, at least about 380, or at least about 400 contiguous amino acids of SEQ ID NO: 226.

[0422] In certain instances, compositions comprise an effector protein and an engineered guide nucleic acid, wherein amino acid sequence of the effector protein is at least 65%, at least 70%, at least 75%, at least 80%, at least 85%, at least 90%, at least 95%, at least 97%, or at least 98%, at least 99%, or 100% identical to SEQ ID NO: 227. In certain instances, compositions comprise an effector protein and an engineered guide nucleic acid, wherein the amino acid sequence of the effector protein comprises at least about 200, at least about 220, at least about 240, at least about 260, at least about 280, at least about 300, at least about 320, at least about 340, at least about 360, at least about 380, or at least about 400 contiguous amino acids of SEQ ID NO: 227.

[0423] In certain instances, compositions comprise an effector protein and an engineered guide nucleic acid, wherein amino acid sequence of the effector protein is at least 65%, at least 70%, at least 75%, at least 80%, at least 85%, at least 90%, at least 95%, at least 97%, or at least 98%, at least 99%, or 100% identical to SEQ ID NO: 228. In certain instances, compositions comprise an effector protein and an engineered guide nucleic acid, wherein the amino acid sequence of the effector protein comprises at least about 200, at least about 220, at least about 240, at least about 260, at least about 280, at least about 300, at least about 320, at least about 340, at least about 360, at least about 380, or at least about 400 contiguous amino acids of SEQ ID NO: 228.

[0424] In certain instances, compositions comprise an effector protein and an engineered guide nucleic acid, wherein amino acid sequence of the effector protein is at least 65%, at least 70%, at least 75%, at least 80%, at least 85%, at least 90%, at least 95%, at least 97%, or at least 98%, at least 99%, or 100% identical to SEQ ID NO: 229. In certain instances, compositions comprise an effector protein and an engineered guide nucleic acid, wherein the amino acid sequence of the effector protein comprises at least about 200, at least about 220, at least about 240, at least about 260, at least about 280, at least about 300, at least about 320, at least about 340, at least about 360, at least about 380, or at least about 400 contiguous amino acids of SEQ ID NO: 229.

[0425] In certain instances, compositions comprise an effector protein and an engineered guide nucleic acid, wherein amino acid sequence of the effector protein is at least 65%, at least 70%, at least 75%, at least 80%, at least 85%, at least 90%, at least 95%, at least 97%, or at least 98%, at least 99%, or 100% identical to SEQ ID NO: 230. In certain instances, compositions comprise an effector protein and an engineered guide nucleic acid, wherein the amino acid sequence of the effector protein comprises at least about 200, at least about 220, at least about 240, at least about 260, at least about 280, at least about 300, at least about 320, at least about 340, at least about 360, at least about 380, or at least about 400 contiguous amino acids of SEQ ID NO: 230.

[0426] In certain instances, compositions comprise an effector protein and an engineered guide nucleic acid, wherein amino acid sequence of the effector protein is at least 65%, at least 70%, at least 75%, at least 80%, at least 85%, at least 90%, at least 95%, at least 97%, or at least 98%, at least 99%, or 100% identical to SEQ ID NO: 231. In certain instances, compositions comprise an effector protein and an engineered guide nucleic acid, wherein the amino acid sequence of the effector protein comprises at least about 200, at least about 220, at least about 240, at least about 260, at least about 280, at least about 300, at least about 320, at least about 340, at least about 360, at least about 380, or at least about 400 contiguous amino acids of SEQ ID NO: 231.

[0427] In certain instances, compositions comprise an effector protein and an engineered guide nucleic acid, wherein amino acid sequence of the effector protein is at least 65%, at least 70%, at least 75%, at least 80%, at least 85%, at least 90%, at least 95%, at least 97%, or at least 98%, at least 99%, or 100% identical to SEQ ID NO: 232. In certain instances, compositions comprise an effector protein and an engineered guide nucleic acid, wherein the amino acid sequence of the effector protein comprises at least about 200, at least about 220, at least about 240, at least about 260, at least about 280, at least about 300, at least about 320, at least about 340, at least about 360, at least about 380, or at least about 400 contiguous amino acids of SEQ ID NO: 232.

[0428] In certain instances, compositions comprise an effector protein and an engineered guide nucleic acid, wherein amino acid sequence of the effector protein is at least 65%, at least 70%, at least 75%, at least 80%, at least 85%, at least 90%, at least 95%, at least 97%, or at least 98%, at least 99%, or 100% identical to SEQ ID NO: 233. In certain instances, compositions comprise an effector protein and an engineered guide nucleic acid, wherein the amino acid sequence of the effector protein comprises at least about 200, at least about 220, at least about 240, at least about 260, at least about 280, at least about 300, at least about 320, at least about 340, at least about 360, at least about 380, or at least about 400 contiguous amino acids of SEQ ID NO: 233.

[0429] In certain instances, compositions comprise an effector protein and an engineered guide nucleic acid, wherein amino acid sequence of the effector protein is at least 65%, at least 70%, at least 75%, at least 80%, at least 85%, at least 90%, at least 95%, at least 97%, or at least 98%, at least 99%, or 100% identical to SEQ ID NO: 234. In certain instances, compositions comprise an effector protein and an engineered guide nucleic acid, wherein the amino acid sequence of the effector protein comprises at least about 200, at least about 220, at least about 240, at least about 260, at least about 280, at least about 300, at least about 320, at least about 340, at least about 360, at least about 380, or at least about 400 contiguous amino acids of SEQ ID NO: 234.

[0430] In certain instances, compositions comprise an effector protein and an engineered guide nucleic acid, wherein amino acid sequence of the effector protein is at least 65%, at least 70%, at least 75%, at least 80%, at least 85%, at least 90%, at least 95%, at least 97%, or at least 98%, at least 99%, or 100% identical to SEQ ID NO: 235. In certain instances, compositions comprise an effector protein and an engineered guide nucleic acid, wherein the amino acid sequence of the effector protein comprises at least about 200, at least about 220, at least about 240, at least about 260, at least about 280, at least about 300, at least about 320, at least about 340, at least about 360, at least about 380, or at least about 400 contiguous amino acids of SEQ ID NO: 235.

[0431] In certain instances, compositions comprise an effector protein and an engineered guide nucleic acid, wherein amino acid sequence of the effector protein is at least 65%, at least 70%, at least 75%, at least 80%, at least 85%, at least 90%, at least 95%, at least 97%, or at least 98%, at least 99%, or 100% identical to SEQ ID NO: 236. In certain instances, compositions comprise an effector protein and an engineered guide nucleic acid, wherein the amino acid sequence of the effector protein comprises at least about 200, at least about 220, at least about 240, at least about 260, at least about 280, at least about 300, at least about 320, at least about 340, at least about 360, at least about 380, or at least about 400 contiguous amino acids of SEQ ID NO: 236.

[0432] In certain instances, compositions comprise an effector protein and an engineered guide nucleic acid, wherein amino acid sequence of the effector protein is at least 65%, at least 70%, at least 75%, at least 80%, at least 85%, at least 90%, at least 95%, at least 97%, or at least 98%, at least 99%, or 100% identical to SEQ ID NO: 237. In certain instances, compositions comprise an effector protein and an engineered guide nucleic acid, wherein the amino acid sequence of the effector protein comprises at least about 200, at least about 220, at least about 240, at least about 260, at least about 280, at least about 300, at least about 320, at least about 340, at least about 360, at least about 380, or at least about 400 contiguous amino acids of SEQ ID NO: 237.

[0433] In certain instances, compositions comprise an effector protein and an engineered guide nucleic acid, wherein amino acid sequence of the effector protein is at least 65%, at least 70%, at least 75%, at least 80%, at least 85%, at least 90%, at least 95%, at least 97%, or at least 98%, at least 99%, or 100% identical to SEQ ID NO: 238. In certain instances, compositions comprise an effector protein and an engineered guide nucleic acid, wherein the amino acid sequence of the effector protein comprises at least about 200, at least about 220, at least about 240, at least about 260, at least about 280, at least about 300, at least about 320, at least about 340, at least about 360, at least about 380, or at least about 400 contiguous amino acids of SEQ ID NO: 238.

[0434] In certain instances, compositions comprise an effector protein and an engineered guide nucleic acid, wherein amino acid sequence of the effector protein is at least 65%, at least 70%, at least 75%, at least 80%, at least 85%, at least 90%, at least 95%, at least 97%, or at least 98%, at least 99%, or 100% identical to SEQ ID NO: 239. In certain instances, compositions comprise an effector protein and an engineered guide nucleic acid, wherein the amino acid sequence of the effector protein comprises at least about 200, at least about 220, at least about 240, at least about 260, at least about 280, at least about 300, at least about 320, at least about 340, at least about 360, at least about 380, or at least about 400 contiguous amino acids of SEQ ID NO: 239.

[0435] In certain instances, compositions comprise an effector protein and an engineered guide nucleic acid, wherein amino acid sequence of the effector protein is at least 65%, at least 70%, at least 75%, at least 80%, at least 85%, at least 90%, at least 95%, at least 97%, or at least 98%, at least 99%, or 100% identical to SEQ ID NO: 240. In certain instances, compositions comprise an effector protein and an engineered guide nucleic acid, wherein the amino acid sequence of the effector protein comprises at least about 200, at least about 220, at least about 240, at least about 260, at least about 280, at least about 300, at least about 320, at least about 340, at least about 360, at least about 380, or at least about 400 contiguous amino acids of SEQ ID NO: 240.

[0436] In some cases, the D2S effector proteins comprise a RuvC domain (e.g., a partial RuvC domain). In some instances, the RuvC domain may be defined by a single, contiguous sequence, or a set of partial RuvC domains that are not contiguous with respect to the primary amino acid sequence of the protein. A D2S effector protein of the present disclosure may include multiple partial RuvC domains, which may combine to generate a RuvC domain with substrate binding or catalytic activity. For example, a D2S Effector Protein may include 3 partial RuvC domains (RuvC-I, RuvC-II, and RuvC-III, also referred to herein as subdomains) that are not contiguous with respect to the primary amino acid sequence of the D2S effector protein, but form a RuvC domain once the protein is produced and folds. In some instances, a partial RuvC domain is a RuvC subdomain. In many cases, D2S effector proteins comprise a recognition domain (e.g., a REC domain) with a binding affinity for a guide nucleic acid or for a guide nucleic acid-target nucleic acid heteroduplex. An effector protein may comprise a zinc finger domain.

[0437] In certain instances, the amino acid sequence of the D2S effector protein comprises an amino acid alteration. In certain instances, the amino acid sequence of the D2S effector protein comprises one or more amino acid alterations. In certain instances, the amino acid sequence of the D2S effector protein comprises two, three, four, five, six, seven, eight, nine, ten or more amino acid alterations. In certain instances, the amino acid sequence of the D2S effector protein comprises two, three, four, five, six, seven, eight, nine, or ten amino acid alterations. In certain instances, the amino acid sequence of the D2S effector protein comprises at least two amino acid alterations. In certain instances, the amino acid sequence of the D2S effector protein comprises at least three amino acid alterations. In certain instances, the amino acid sequence of the D2S effector protein comprises at least four amino acid alterations. In certain instances, the amino acid sequence of the D2S effector protein comprises at least at least five amino acid alterations. In certain instances, the amino acid sequence of the D2S effector protein comprises at least six amino acid alterations. In certain instances, the amino acid sequence of the D2S effector protein comprises at least seven amino acid alterations. In certain instances, the amino acid sequence of the D2S effector protein comprises at least eight amino acid alterations. In certain instances, the amino acid sequence of the D2S effector protein comprises at least nine amino acid alterations. In certain instances, the amino acid sequence of the D2S effector protein comprises at least ten amino acid alterations. In some instances, the amino acid sequence of the D2S effector protein is at least 65%, at least 70%, at least 75%, at least 80%, at least 85%, at least 90%, at least 95%, at least 97%, or at least 98%, at least 99%, or 100% identical to SEQ ID NO: 23 wherein the amino acid sequence of the D2S effector protein comprises one or more amino acid alterations relative to SEQ ID NO: 23.

[0438] In some embodiments, the D2S protein comprises one or more amino acid alterations at positions 110, 111, 112, 113, 114, 115, 116, 117, 118, 119, 122, 123, 124, 125, 126, 127, 128, 129, 130, 131, 132, 261, 263, 264, 265, 266, 267, 268, 269, 270, 271, 272, 273, 274, 275, 276, 277, 278, 279, 280, 281, 282, 457, 458, 459, 460, 461, 462, 463, 464, 466, 467, or 468, or any combination thereof, of SEQ ID NO: 23 when the sequence of the D2S protein and SEQ ID NO: 23 are aligned for maximum alignment.

[0439] In some embodiments, the D2S protein comprises one or more amino acid alteration at a position corresponding to residue A110, T111, E112, M113, S114, T115, Q116, S117, L118, S119, F122, A123, T124, E125, L126, E127, T128, N129, 1130, F131, A132, K261, V263, V264, G265, V266, D267, L268, G269, 1270, N271, V272, P273, A274, Y275, V276, A277, T278, N279, 1280, T281, E282, E363, 1457, A458, N459, S460, K461, D462, 1463, 1464, K466, N467, or E468, or any combination thereof of SEQ ID NO: 23. In some cases, these amino acid alterations could be applied to CasM.19952 or proteins homologous to CasM.19952 (protein homologs), wherein the protein homologs have the same amino acid as CasM.19952 before the amino acid is altered at that position when CasM.19952 and the protein homolog are aligned for maximal alignment.

[0440] In some embodiments, the one or more amino acid alteration can be an insertion, deletion, or substitution. In some embodiments, the one or more amino acid alteration can be a substitution. In some embodiments, the one or more amino acid alteration can be a conservative or non-conservative amino acid substitution. In some instances, the D2S effector protein comprises an arginine substitution. In some instances, the alteration corresponds to an alteration shown in TABLE 9, Example 18, or Example 19. In some instances, the one or more amino acid alteration is A110R, T111R, E112R, M113R, S114R, T115R, Q116R, S117R, L118R, S119R, F122R, A123R, T124R, E125R, L126R, E127R, T128R, N129R, 1130R, F131R, A132R, K261R, V263R, V264R, G265R, V266R, D267R, D267A, D267N, L268R, G269R, 1270R, N271R, V272R, P273R, A274R, Y275R, V276R, A277R, T278R, N279R, 1280R, T281R, E282R, E363Q, I457R, A458R, N459R, S460R, K461R, D462R, I463R, I464R, K466R, N467R, or E468R of SEQ ID NO: 23. In some instances, the D2S protein comprises the amino acid alteration T115R, T124R, L126R, E127R, T128R, N129R, A132R, K261R, V263R, T278R, T281R, E282R, N459R, S460R, D462R, K466R, N467R, E468R of SEQ ID NO: 23. In some instances, the D2S protein comprises, the one or more amino acid alteration is T124R, T128R, N129R, T278R, E282R, T281R, or any combination thereof of SEQ ID NO: 23.

[0441] When a conservative substitution is described herein, such a substitution refers to the replacement of one amino acid for another such that the replacement takes place within a family of amino acids that are related in their side chains. Alternatively, a non-conservative substitution, when described herein, refers to the replacement of one amino acid residue for another such that the replaced residue is going from one family of amino acids to a different family of residues. Genetically encoded amino acids can be divided into four families: (1) acidic (negatively charged)=Asp (D), Glu (G); (2) basic (positively charged)=Lys (K), Arg (R), His (H); (3) non-polar (hydrophobic)=Cys (C), Ala (A), Val (V), Leu (L), Ile (I), Pro (P), Phe (F), Met (M), Trp (W), Gly (G), Tyr (Y), with non-polar also being subdivided into: (i) strongly hydrophobic=Ala (A), Val (V), Leu (L), Ile (I), Met (M), Phe (F); and (ii) moderately hydrophobic=Gly (G), Pro (P), Cys (C), Tyr (Y), Trp (W); and (4) uncharged polar=Asn (N), Gln (Q), Ser (S), Thr (T). In alternative fashion, the amino acid repertoire can be grouped as (1) acidic (negatively charged)=Asp (D), Glu (G); (2) basic (positively charged)=Lys (K), Arg (R), His (H), and (3) aliphatic=Gly (G), Ala (A), Val (V), Leu (L), Ile (I), Ser (S), Thr (T), with Ser (S) and Thr (T) optionally being grouped separately as aliphatic-hydroxyl; (4) aromatic=Phe (F), Tyr (Y), Trp (W); (5) amide=Asn (N), Glu (Q); and (6) sulfur-containing=Cys (C) and Met (M) (see, for example, Biochemistry, 4th ed., Ed. by L. Stryer, WH Freeman and Co., 1995, which is incorporated by reference herein in its entirety).

[0442] In some instances, the amino acid sequence of the D2S effector protein, other than the one or more amino acid alteration as described herein, is at least 65%, at least 70%, at least 75%, at least 80%, at least 85%, at least 90%, at least 95%, at least 97%, or at least 98%, at least 99%, or 100% identical to any one of SEQ ID NOs: 241-293. In some instances, the amino acid sequence of the D2S effector protein, other than the one or more amino acid alteration corresponding to the alteration shown in TABLE 9, is at least 65%, at least 70%, at least 75%, at least 80%, at least 85%, at least 90%, at least 95%, at least 97%, or at least 98%, at least 99%, or 100% identical to any one of SEQ ID NOs: 241-293.

[0443] In certain instances, compositions comprise an effector protein and an engineered guide nucleic acid, wherein the amino acid sequence of the effector protein, other than the amino acid alteration at position 110, is at least 65%, at least 70%, at least 75%, at least 80%, at least 85%, at least 90%, at least 95%, at least 97%, or at least 98%, at least 99%, or 100% identical to SEQ ID NO: 241. In certain instances, compositions comprise an effector protein and an engineered guide nucleic acid, wherein the amino acid sequence of the effector protein, other than the amino acid alteration at position 110, comprises at least about 200, at least about 220, at least about 240, at least about 260, at least about 280, at least about 300, at least about 320, at least about 340, at least about 360, at least about 380, or at least about 400 contiguous amino acids of SEQ ID NO. 241.

[0444] In certain instances, compositions comprise an effector protein and an engineered guide nucleic acid, wherein the amino acid sequence of the effector protein, other than the amino acid alteration at position 111, is at least 65%, at least 70%, at least 75%, at least 80%, at least 85%, at least 90%, at least 95%, at least 97%, or at least 98%, at least 99%, or 100% identical to SEQ ID NO: 242. In certain instances, compositions comprise an effector protein and an engineered guide nucleic acid, wherein the amino acid sequence of the effector protein, other than the amino acid alteration at position 111, comprises at least about 200, at least about 220, at least about 240, at least about 260, at least about 280, at least about 300, at least about 320, at least about 340, at least about 360, at least about 380, or at least about 400 contiguous amino acids of SEQ ID NO. 242.

[0445] In certain instances, compositions comprise an effector protein and an engineered guide nucleic acid, wherein the amino acid sequence of the effector protein, other than the amino acid alteration at position 112, is at least 65%, at least 70%, at least 75%, at least 80%, at least 85%, at least 90%, at least 95%, at least 97%, or at least 98%, at least 99%, or 100% identical to SEQ ID NO: 243. In certain instances, compositions comprise an effector protein and an engineered guide nucleic acid, wherein the amino acid sequence of the effector protein, other than the amino acid alteration at position 112, comprises at least about 200, at least about 220, at least about 240, at least about 260, at least about 280, at least about 300, at least about 320, at least about 340, at least about 360, at least about 380, or at least about 400 contiguous amino acids of SEQ ID NO. 243.

[0446] In certain instances, compositions comprise an effector protein and an engineered guide nucleic acid, wherein the amino acid sequence of the effector protein, other than the amino acid alteration at position 113, is at least 65%, at least 70%, at least 75%, at least 80%, at least 85%, at least 90%, at least 95%, at least 97%, or at least 98%, at least 99%, or 100% identical to SEQ ID NO: 244. In certain instances, compositions comprise an effector protein and an engineered guide nucleic acid, wherein the amino acid sequence of the effector protein, other than the amino acid alteration at position 113, comprises at least about 200, at least about 220, at least about 240, at least about 260, at least about 280, at least about 300, at least about 320, at least about 340, at least about 360, at least about 380, or at least about 400 contiguous amino acids of SEQ ID NO. 244.

[0447] In certain instances, compositions comprise an effector protein and an engineered guide nucleic acid, wherein the amino acid sequence of the effector protein, other than the amino acid alteration at position 114, is at least 65%, at least 70%, at least 75%, at least 80%, at least 85%, at least 90%, at least 95%, at least 97%, or at least 98%, at least 99%, or 100% identical to SEQ ID NO: 245. In certain instances, compositions comprise an effector protein and an engineered guide nucleic acid, wherein the amino acid sequence of the effector protein, other than the amino acid alteration at position 114, comprises at least about 200, at least about 220, at least about 240, at least about 260, at least about 280, at least about 300, at least about 320, at least about 340, at least about 360, at least about 380, or at least about 400 contiguous amino acids of SEQ ID NO. 245.

[0448] In certain instances, compositions comprise an effector protein and an engineered guide nucleic acid, wherein the amino acid sequence of the effector protein, other than the amino acid alteration at position 115, is at least 65%, at least 70%, at least 75%, at least 80%, at least 85%, at least 90%, at least 95%, at least 97%, or at least 98%, at least 99%, or 100% identical to SEQ ID NO: 246. In certain instances, compositions comprise an effector protein and an engineered guide nucleic acid, wherein the amino acid sequence of the effector protein, other than the amino acid alteration at position 115, comprises at least about 200, at least about 220, at least about 240, at least about 260, at least about 280, at least about 300, at least about 320, at least about 340, at least about 360, at least about 380, or at least about 400 contiguous amino acids of SEQ ID NO. 246.

[0449] In certain instances, compositions comprise an effector protein and an engineered guide nucleic acid, wherein the amino acid sequence of the effector protein, other than the amino acid alteration at position 116, is at least 65%, at least 70%, at least 75%, at least 80%, at least 85%, at least 90%, at least 95%, at least 97%, or at least 98%, at least 99%, or 100% identical to SEQ ID NO: 247. In certain instances, compositions comprise an effector protein and an engineered guide nucleic acid, wherein the amino acid sequence of the effector protein, other than the amino acid alteration at position 116, comprises at least about 200, at least about 220, at least about 240, at least about 260, at least about 280, at least about 300, at least about 320, at least about 340, at least about 360, at least about 380, or at least about 400 contiguous amino acids of SEQ ID NO. 247.

[0450] In certain instances, compositions comprise an effector protein and an engineered guide nucleic acid, wherein the amino acid sequence of the effector protein, other than the amino acid alteration at position 117, is at least 65%, at least 70%, at least 75%, at least 80%, at least 85%, at least 90%, at least 95%, at least 97%, or at least 98%, at least 99%, or 100% identical to SEQ ID NO: 248. In certain instances, compositions comprise an effector protein and an engineered guide nucleic acid, wherein the amino acid sequence of the effector protein, other than the amino acid alteration at position 117, comprises at least about 200, at least about 220, at least about 240, at least about 260, at least about 280, at least about 300, at least about 320, at least about 340, at least about 360, at least about 380, or at least about 400 contiguous amino acids of SEQ ID NO. 248.

[0451] In certain instances, compositions comprise an effector protein and an engineered guide nucleic acid, wherein the amino acid sequence of the effector protein, other than the amino acid alteration at position 118, is at least 65%, at least 70%, at least 75%, at least 80%, at least 85%, at least 90%, at least 95%, at least 97%, or at least 98%, at least 99%, or 100% identical to SEQ ID NO: 249. In certain instances, compositions comprise an effector protein and an engineered guide nucleic acid, wherein the amino acid sequence of the effector protein, other than the amino acid alteration at position 118, comprises at least about 200, at least about 220, at least about 240, at least about 260, at least about 280, at least about 300, at least about 320, at least about 340, at least about 360, at least about 380, or at least about 400 contiguous amino acids of SEQ ID NO. 249.

[0452] In certain instances, compositions comprise an effector protein and an engineered guide nucleic acid, wherein the amino acid sequence of the effector protein, other than the amino acid alteration at position 119, is at least 65%, at least 70%, at least 75%, at least 80%, at least 85%, at least 90%, at least 95%, at least 97%, or at least 98%, at least 99%, or 100% identical to SEQ ID NO: 250. In certain instances, compositions comprise an effector protein and an engineered guide nucleic acid, wherein the amino acid sequence of the effector protein, other than the amino acid alteration at position 119, comprises at least about 200, at least about 220, at least about 240, at least about 260, at least about 280, at least about 300, at least about 320, at least about 340, at least about 360, at least about 380, or at least about 400 contiguous amino acids of SEQ ID NO. 250.

[0453] In certain instances, compositions comprise an effector protein and an engineered guide nucleic acid, wherein the amino acid sequence of the effector protein, other than the amino acid alteration at position 122, is at least 65%, at least 70%, at least 75%, at least 80%, at least 85%, at least 90%, at least 95%, at least 97%, or at least 98%, at least 99%, or 100% identical to SEQ ID NO: 251. In certain instances, compositions comprise an effector protein and an engineered guide nucleic acid, wherein the amino acid sequence of the effector protein, other than the amino acid alteration at position 122, comprises at least about 200, at least about 220, at least about 240, at least about 260, at least about 280, at least about 300, at least about 320, at least about 340, at least about 360, at least about 380, or at least about 400 contiguous amino acids of SEQ ID NO. 251.

[0454] In certain instances, compositions comprise an effector protein and an engineered guide nucleic acid, wherein the amino acid sequence of the effector protein, other than the amino acid alteration at position 123, is at least 65%, at least 70%, at least 75%, at least 80%, at least 85%, at least 90%, at least 95%, at least 97%, or at least 98%, at least 99%, or 100% identical to SEQ ID NO: 252. In certain instances, compositions comprise an effector protein and an engineered guide nucleic acid, wherein the amino acid sequence of the effector protein, other than the amino acid alteration at position 123, comprises at least about 200, at least about 220, at least about 240, at least about 260, at least about 280, at least about 300, at least about 320, at least about 340, at least about 360, at least about 380, or at least about 400 contiguous amino acids of SEQ ID NO. 252.

[0455] In certain instances, compositions comprise an effector protein and an engineered guide nucleic acid, wherein the amino acid sequence of the effector protein, other than the amino acid alteration at position 124, is at least 65%, at least 70%, at least 75%, at least 80%, at least 85%, at least 90%, at least 95%, at least 97%, or at least 98%, at least 99%, or 100% identical to SEQ ID NO: 253. In certain instances, compositions comprise an effector protein and an engineered guide nucleic acid, wherein the amino acid sequence of the effector protein, other than the amino acid alteration at position 124, comprises at least about 200, at least about 220, at least about 240, at least about 260, at least about 280, at least about 300, at least about 320, at least about 340, at least about 360, at least about 380, or at least about 400 contiguous amino acids of SEQ ID NO. 253.

[0456] In certain instances, compositions comprise an effector protein and an engineered guide nucleic acid, wherein the amino acid sequence of the effector protein, other than the amino acid alteration at position 125, is at least 65%, at least 70%, at least 75%, at least 80%, at least 85%, at least 90%, at least 95%, at least 97%, or at least 98%, at least 99%, or 100% identical to SEQ ID NO: 254. In certain instances, compositions comprise an effector protein and an engineered guide nucleic acid, wherein the amino acid sequence of the effector protein, other than the amino acid alteration at position 125, comprises at least about 200, at least about 220, at least about 240, at least about 260, at least about 280, at least about 300, at least about 320, at least about 340, at least about 360, at least about 380, or at least about 400 contiguous amino acids of SEQ ID NO. 254.

[0457] In certain instances, compositions comprise an effector protein and an engineered guide nucleic acid, wherein the amino acid sequence of the effector protein, other than the amino acid alteration at position 126, is at least 65%, at least 70%, at least 75%, at least 80%, at least 85%, at least 90%, at least 95%, at least 97%, or at least 98%, at least 99%, or 100% identical to SEQ ID NO: 255. In certain instances, compositions comprise an effector protein and an engineered guide nucleic acid, wherein the amino acid sequence of the effector protein, other than the amino acid alteration at position 126, comprises at least about 200, at least about 220, at least about 240, at least about 260, at least about 280, at least about 300, at least about 320, at least about 340, at least about 360, at least about 380, or at least about 400 contiguous amino acids of SEQ ID NO. 255.

[0458] In certain instances, compositions comprise an effector protein and an engineered guide nucleic acid, wherein the amino acid sequence of the effector protein, other than the amino acid alteration at position 127, is at least 65%, at least 70%, at least 75%, at least 80%, at least 85%, at least 90%, at least 95%, at least 97%, or at least 98%, at least 99%, or 100% identical to SEQ ID NO: 256. In certain instances, compositions comprise an effector protein and an engineered guide nucleic acid, wherein the amino acid sequence of the effector protein, other than the amino acid alteration at position 127, comprises at least about 200, at least about 220, at least about 240, at least about 260, at least about 280, at least about 300, at least about 320, at least about 340, at least about 360, at least about 380, or at least about 400 contiguous amino acids of SEQ ID NO. 256.

[0459] In certain instances, compositions comprise an effector protein and an engineered guide nucleic acid, wherein the amino acid sequence of the effector protein, other than the amino acid alteration at position 128, is at least 65%, at least 70%, at least 75%, at least 80%, at least 85%, at least 90%, at least 95%, at least 97%, or at least 98%, at least 99%, or 100% identical to SEQ ID NO: 257. In certain instances, compositions comprise an effector protein and an engineered guide nucleic acid, wherein the amino acid sequence of the effector protein, other than the amino acid alteration at position 128, comprises at least about 200, at least about 220, at least about 240, at least about 260, at least about 280, at least about 300, at least about 320, at least about 340, at least about 360, at least about 380, or at least about 400 contiguous amino acids of SEQ ID NO. 257.

[0460] In certain instances, compositions comprise an effector protein and an engineered guide nucleic acid, wherein the amino acid sequence of the effector protein, other than the amino acid alteration at position 129, is at least 65%, at least 70%, at least 75%, at least 80%, at least 85%, at least 90%, at least 95%, at least 97%, or at least 98%, at least 99%, or 100% identical to SEQ ID NO: 258. In certain instances, compositions comprise an effector protein and an engineered guide nucleic acid, wherein the amino acid sequence of the effector protein, other than the amino acid alteration at position 129, comprises at least about 200, at least about 220, at least about 240, at least about 260, at least about 280, at least about 300, at least about 320, at least about 340, at least about 360, at least about 380, or at least about 400 contiguous amino acids of SEQ ID NO. 258.

[0461] In certain instances, compositions comprise an effector protein and an engineered guide nucleic acid, wherein the amino acid sequence of the effector protein, other than the amino acid alteration at position 130, is at least 65%, at least 70%, at least 75%, at least 80%, at least 85%, at least 90%, at least 95%, at least 97%, or at least 98%, at least 99%, or 100% identical to SEQ ID NO: 259. In certain instances, compositions comprise an effector protein and an engineered guide nucleic acid, wherein the amino acid sequence of the effector protein, other than the amino acid alteration at position 130, comprises at least about 200, at least about 220, at least about 240, at least about 260, at least about 280, at least about 300, at least about 320, at least about 340, at least about 360, at least about 380, or at least about 400 contiguous amino acids of SEQ ID NO. 259.

[0462] In certain instances, compositions comprise an effector protein and an engineered guide nucleic acid, wherein the amino acid sequence of the effector protein, other than the amino acid alteration at position 131, is at least 65%, at least 70%, at least 75%, at least 80%, at least 85%, at least 90%, at least 95%, at least 97%, or at least 98%, at least 99%, or 100% identical to SEQ ID NO: 260. In certain instances, compositions comprise an effector protein and an engineered guide nucleic acid, wherein the amino acid sequence of the effector protein, other than the amino acid alteration at position 131, comprises at least about 200, at least about 220, at least about 240, at least about 260, at least about 280, at least about 300, at least about 320, at least about 340, at least about 360, at least about 380, or at least about 400 contiguous amino acids of SEQ ID NO. 260.

[0463] In certain instances, compositions comprise an effector protein and an engineered guide nucleic acid, wherein the amino acid sequence of the effector protein, other than the amino acid alteration at position 132, is at least 65%, at least 70%, at least 75%, at least 80%, at least 85%, at least 90%, at least 95%, at least 97%, or at least 98%, at least 99%, or 100% identical to SEQ ID NO: 261. In certain instances, compositions comprise an effector protein and an engineered guide nucleic acid, wherein the amino acid sequence of the effector protein, other than the amino acid alteration at position 132, comprises at least about 200, at least about 220, at least about 240, at least about 260, at least about 280, at least about 300, at least about 320, at least about 340, at least about 360, at least about 380, or at least about 400 contiguous amino acids of SEQ ID NO. 261.

[0464] In certain instances, compositions comprise an effector protein and an engineered guide nucleic acid, wherein the amino acid sequence of the effector protein, other than the amino acid alteration at position 261, is at least 65%, at least 70%, at least 75%, at least 80%, at least 85%, at least 90%, at least 95%, at least 97%, or at least 98%, at least 99%, or 100% identical to SEQ ID NO: 262. In certain instances, compositions comprise an effector protein and an engineered guide nucleic acid, wherein the amino acid sequence of the effector protein, other than the amino acid alteration at position 261, comprises at least about 200, at least about 220, at least about 240, at least about 260, at least about 280, at least about 300, at least about 320, at least about 340, at least about 360, at least about 380, or at least about 400 contiguous amino acids of SEQ ID NO. 262.

[0465] In certain instances, compositions comprise an effector protein and an engineered guide nucleic acid, wherein the amino acid sequence of the effector protein, other than the amino acid alteration at position 263, is at least 65%, at least 70%, at least 75%, at least 80%, at least 85%, at least 90%, at least 95%, at least 97%, or at least 98%, at least 99%, or 100% identical to SEQ ID NO: 263. In certain instances, compositions comprise an effector protein and an engineered guide nucleic acid, wherein the amino acid sequence of the effector protein, other than the amino acid alteration at position 263, comprises at least about 200, at least about 220, at least about 240, at least about 260, at least about 280, at least about 300, at least about 320, at least about 340, at least about 360, at least about 380, or at least about 400 contiguous amino acids of SEQ ID NO. 263.

[0466] In certain instances, compositions comprise an effector protein and an engineered guide nucleic acid, wherein the amino acid sequence of the effector protein, other than the amino acid alteration at position 264, is at least 65%, at least 70%, at least 75%, at least 80%, at least 85%, at least 90%, at least 95%, at least 97%, or at least 98%, at least 99%, or 100% identical to SEQ ID NO: 264. In certain instances, compositions comprise an effector protein and an engineered guide nucleic acid, wherein the amino acid sequence of the effector protein, other than the amino acid alteration at position 264, comprises at least about 200, at least about 220, at least about 240, at least about 260, at least about 280, at least about 300, at least about 320, at least about 340, at least about 360, at least about 380, or at least about 400 contiguous amino acids of SEQ ID NO. 264.

[0467] In certain instances, compositions comprise an effector protein and an engineered guide nucleic acid, wherein the amino acid sequence of the effector protein, other than the amino acid alteration at position 265, is at least 65%, at least 70%, at least 75%, at least 80%, at least 85%, at least 90%, at least 95%, at least 97%, or at least 98%, at least 99%, or 100% identical to SEQ ID NO: 265. In certain instances, compositions comprise an effector protein and an engineered guide nucleic acid, wherein the amino acid sequence of the effector protein, other than the amino acid alteration at position 265, comprises at least about 200, at least about 220, at least about 240, at least about 260, at least about 280, at least about 300, at least about 320, at least about 340, at least about 360, at least about 380, or at least about 400 contiguous amino acids of SEQ ID NO. 265.

[0468] In certain instances, compositions comprise an effector protein and an engineered guide nucleic acid, wherein the amino acid sequence of the effector protein, other than the amino acid alteration at position 266, is at least 65%, at least 70%, at least 75%, at least 80%, at least 85%, at least 90%, at least 95%, at least 97%, or at least 98%, at least 99%, or 100% identical to SEQ ID NO: 266. In certain instances, compositions comprise an effector protein and an engineered guide nucleic acid, wherein the amino acid sequence of the effector protein, other than the amino acid alteration at position 266, comprises at least about 200, at least about 220, at least about 240, at least about 260, at least about 280, at least about 300, at least about 320, at least about 340, at least about 360, at least about 380, or at least about 400 contiguous amino acids of SEQ ID NO. 266.

[0469] In certain instances, compositions comprise an effector protein and an engineered guide nucleic acid, wherein the amino acid sequence of the effector protein, other than the amino acid alteration at position 267, is at least 65%, at least 70%, at least 75%, at least 80%, at least 85%, at least 90%, at least 95%, at least 97%, or at least 98%, at least 99%, or 100% identical to SEQ ID NO: 267. In certain instances, compositions comprise an effector protein and an engineered guide nucleic acid, wherein the amino acid sequence of the effector protein, other than the amino acid alteration at position 267, comprises at least about 200, at least about 220, at least about 240, at least about 260, at least about 280, at least about 300, at least about 320, at least about 340, at least about 360, at least about 380, or at least about 400 contiguous amino acids of SEQ ID NO. 267.

[0470] In certain instances, compositions comprise an effector protein and an engineered guide nucleic acid, wherein the amino acid sequence of the effector protein, other than the amino acid alteration at position 268, is at least 65%, at least 70%, at least 75%, at least 80%, at least 85%, at least 90%, at least 95%, at least 97%, or at least 98%, at least 99%, or 100% identical to SEQ ID NO: 268. In certain instances, compositions comprise an effector protein and an engineered guide nucleic acid, wherein the amino acid sequence of the effector protein, other than the amino acid alteration at position 268, comprises at least about 200, at least about 220, at least about 240, at least about 260, at least about 280, at least about 300, at least about 320, at least about 340, at least about 360, at least about 380, or at least about 400 contiguous amino acids of SEQ ID NO. 268.

[0471] In certain instances, compositions comprise an effector protein and an engineered guide nucleic acid, wherein the amino acid sequence of the effector protein, other than the amino acid alteration at position 269, is at least 65%, at least 70%, at least 75%, at least 80%, at least 85%, at least 90%, at least 95%, at least 97%, or at least 98%, at least 99%, or 100% identical to SEQ ID NO: 269. In certain instances, compositions comprise an effector protein and an engineered guide nucleic acid, wherein the amino acid sequence of the effector protein, other than the amino acid alteration at position 269, comprises at least about 200, at least about 220, at least about 240, at least about 260, at least about 280, at least about 300, at least about 320, at least about 340, at least about 360, at least about 380, or at least about 400 contiguous amino acids of SEQ ID NO. 269.

[0472] In certain instances, compositions comprise an effector protein and an engineered guide nucleic acid, wherein the amino acid sequence of the effector protein, other than the amino acid alteration at position 270, is at least 65%, at least 70%, at least 75%, at least 80%, at least 85%, at least 90%, at least 95%, at least 97%, or at least 98%, at least 99%, or 100% identical to SEQ ID NO: 270. In certain instances, compositions comprise an effector protein and an engineered guide nucleic acid, wherein the amino acid sequence of the effector protein, other than the amino acid alteration at position 270, comprises at least about 200, at least about 220, at least about 240, at least about 260, at least about 280, at least about 300, at least about 320, at least about 340, at least about 360, at least about 380, or at least about 400 contiguous amino acids of SEQ ID NO. 270.

[0473] In certain instances, compositions comprise an effector protein and an engineered guide nucleic acid, wherein the amino acid sequence of the effector protein, other than the amino acid alteration at position 271, is at least 65%, at least 70%, at least 75%, at least 80%, at least 85%, at least 90%, at least 95%, at least 97%, or at least 98%, at least 99%, or 100% identical to SEQ ID NO: 271. In certain instances, compositions comprise an effector protein and an engineered guide nucleic acid, wherein the amino acid sequence of the effector protein, other than the amino acid alteration at position 271, comprises at least about 200, at least about 220, at least about 240, at least about 260, at least about 280, at least about 300, at least about 320, at least about 340, at least about 360, at least about 380, or at least about 400 contiguous amino acids of SEQ ID NO. 271.

[0474] In certain instances, compositions comprise an effector protein and an engineered guide nucleic acid, wherein the amino acid sequence of the effector protein, other than the amino acid alteration at position 272, is at least 65%, at least 70%, at least 75%, at least 80%, at least 85%, at least 90%, at least 95%, at least 97%, or at least 98%, at least 99%, or 100% identical to SEQ ID NO: 272. In certain instances, compositions comprise an effector protein and an engineered guide nucleic acid, wherein the amino acid sequence of the effector protein, other than the amino acid alteration at position 272, comprises at least about 200, at least about 220, at least about 240, at least about 260, at least about 280, at least about 300, at least about 320, at least about 340, at least about 360, at least about 380, or at least about 400 contiguous amino acids of SEQ ID NO. 272.

[0475] In certain instances, compositions comprise an effector protein and an engineered guide nucleic acid, wherein the amino acid sequence of the effector protein, other than the amino acid alteration at position 273, is at least 65%, at least 70%, at least 75%, at least 80%, at least 85%, at least 90%, at least 95%, at least 97%, or at least 98%, at least 99%, or 100% identical to SEQ ID NO: 273. In certain instances, compositions comprise an effector protein and an engineered guide nucleic acid, wherein the amino acid sequence of the effector protein, other than the amino acid alteration at position 273, comprises at least about 200, at least about 220, at least about 240, at least about 260, at least about 280, at least about 300, at least about 320, at least about 340, at least about 360, at least about 380, or at least about 400 contiguous amino acids of SEQ ID NO. 273.

[0476] In certain instances, compositions comprise an effector protein and an engineered guide nucleic acid, wherein the amino acid sequence of the effector protein, other than the amino acid alteration at position 274, is at least 65%, at least 70%, at least 75%, at least 80%, at least 85%, at least 90%, at least 95%, at least 97%, or at least 98%, at least 99%, or 100% identical to SEQ ID NO: 274. In certain instances, compositions comprise an effector protein and an engineered guide nucleic acid, wherein the amino acid sequence of the effector protein, other than the amino acid alteration at position 274, comprises at least about 200, at least about 220, at least about 240, at least about 260, at least about 280, at least about 300, at least about 320, at least about 340, at least about 360, at least about 380, or at least about 400 contiguous amino acids of SEQ ID NO. 274.

[0477] In certain instances, compositions comprise an effector protein and an engineered guide nucleic acid, wherein the amino acid sequence of the effector protein, other than the amino acid alteration at position 275, is at least 65%, at least 70%, at least 75%, at least 80%, at least 85%, at least 90%, at least 95%, at least 97%, or at least 98%, at least 99%, or 100% identical to SEQ ID NO: 275. In certain instances, compositions comprise an effector protein and an engineered guide nucleic acid, wherein the amino acid sequence of the effector protein, other than the amino acid alteration at position 275, comprises at least about 200, at least about 220, at least about 240, at least about 260, at least about 280, at least about 300, at least about 320, at least about 340, at least about 360, at least about 380, or at least about 400 contiguous amino acids of SEQ ID NO. 275.

[0478] In certain instances, compositions comprise an effector protein and an engineered guide nucleic acid, wherein the amino acid sequence of the effector protein, other than the amino acid alteration at position 276, is at least 65%, at least 70%, at least 75%, at least 80%, at least 85%, at least 90%, at least 95%, at least 97%, or at least 98%, at least 99%, or 100% identical to SEQ ID NO: 276. In certain instances, compositions comprise an effector protein and an engineered guide nucleic acid, wherein the amino acid sequence of the effector protein, other than the amino acid alteration at position 276, comprises at least about 200, at least about 220, at least about 240, at least about 260, at least about 280, at least about 300, at least about 320, at least about 340, at least about 360, at least about 380, or at least about 400 contiguous amino acids of SEQ ID NO. 276.

[0479] In certain instances, compositions comprise an effector protein and an engineered guide nucleic acid, wherein the amino acid sequence of the effector protein, other than the amino acid alteration at position 277, is at least 65%, at least 70%, at least 75%, at least 80%, at least 85%, at least 90%, at least 95%, at least 97%, or at least 98%, at least 99%, or 100% identical to SEQ ID NO: 277. In certain instances, compositions comprise an effector protein and an engineered guide nucleic acid, wherein the amino acid sequence of the effector protein, other than the amino acid alteration at position 277, comprises at least about 200, at least about 220, at least about 240, at least about 260, at least about 280, at least about 300, at least about 320, at least about 340, at least about 360, at least about 380, or at least about 400 contiguous amino acids of SEQ ID NO. 277.

[0480] In certain instances, compositions comprise an effector protein and an engineered guide nucleic acid, wherein the amino acid sequence of the effector protein, other than the amino acid alteration at position 278, is at least 65%, at least 70%, at least 75%, at least 80%, at least 85%, at least 90%, at least 95%, at least 97%, or at least 98%, at least 99%, or 100% identical to SEQ ID NO: 278. In certain instances, compositions comprise an effector protein and an engineered guide nucleic acid, wherein the amino acid sequence of the effector protein, other than the amino acid alteration at position 278, comprises at least about 200, at least about 220, at least about 240, at least about 260, at least about 280, at least about 300, at least about 320, at least about 340, at least about 360, at least about 380, or at least about 400 contiguous amino acids of SEQ ID NO. 278.

[0481] In certain instances, compositions comprise an effector protein and an engineered guide nucleic acid, wherein the amino acid sequence of the effector protein, other than the amino acid alteration at position 279, is at least 65%, at least 70%, at least 75%, at least 80%, at least 85%, at least 90%, at least 95%, at least 97%, or at least 98%, at least 99%, or 100% identical to SEQ ID NO: 279. In certain instances, compositions comprise an effector protein and an engineered guide nucleic acid, wherein the amino acid sequence of the effector protein, other than the amino acid alteration at position 279, comprises at least about 200, at least about 220, at least about 240, at least about 260, at least about 280, at least about 300, at least about 320, at least about 340, at least about 360, at least about 380, or at least about 400 contiguous amino acids of SEQ ID NO. 279.

[0482] In certain instances, compositions comprise an effector protein and an engineered guide nucleic acid, wherein the amino acid sequence of the effector protein, other than the amino acid alteration at position 280, is at least 65%, at least 70%, at least 75%, at least 80%, at least 85%, at least 90%, at least 95%, at least 97%, or at least 98%, at least 99%, or 100% identical to SEQ ID NO: 280. In certain instances, compositions comprise an effector protein and an engineered guide nucleic acid, wherein the amino acid sequence of the effector protein, other than the amino acid alteration at position 280, comprises at least about 200, at least about 220, at least about 240, at least about 260, at least about 280, at least about 300, at least about 320, at least about 340, at least about 360, at least about 380, or at least about 400 contiguous amino acids of SEQ ID NO. 280.

[0483] In certain instances, compositions comprise an effector protein and an engineered guide nucleic acid, wherein the amino acid sequence of the effector protein, other than the amino acid alteration at position 281, is at least 65%, at least 70%, at least 75%, at least 80%, at least 85%, at least 90%, at least 95%, at least 97%, or at least 98%, at least 99%, or 100% identical to SEQ ID NO: 281. In certain instances, compositions comprise an effector protein and an engineered guide nucleic acid, wherein the amino acid sequence of the effector protein, other than the amino acid alteration at position 281, comprises at least about 200, at least about 220, at least about 240, at least about 260, at least about 280, at least about 300, at least about 320, at least about 340, at least about 360, at least about 380, or at least about 400 contiguous amino acids of SEQ ID NO. 281.

[0484] In certain instances, compositions comprise an effector protein and an engineered guide nucleic acid, wherein the amino acid sequence of the effector protein, other than the amino acid alteration at position 282, is at least 65%, at least 70%, at least 75%, at least 80%, at least 85%, at least 90%, at least 95%, at least 97%, or at least 98%, at least 99%, or 100% identical to SEQ ID NO: 282. In certain instances, compositions comprise an effector protein and an engineered guide nucleic acid, wherein the amino acid sequence of the effector protein, other than the amino acid alteration at position 282, comprises at least about 200, at least about 220, at least about 240, at least about 260, at least about 280, at least about 300, at least about 320, at least about 340, at least about 360, at least about 380, or at least about 400 contiguous amino acids of SEQ ID NO. 282.

[0485] In certain instances, compositions comprise an effector protein and an engineered guide nucleic acid, wherein the amino acid sequence of the effector protein, other than the amino acid alteration at position 457, is at least 65%, at least 70%, at least 75%, at least 80%, at least 85%, at least 90%, at least 95%, at least 97%, or at least 98%, at least 99%, or 100% identical to SEQ ID NO: 283. In certain instances, compositions comprise an effector protein and an engineered guide nucleic acid, wherein the amino acid sequence of the effector protein, other than the amino acid alteration at position 457, comprises at least about 200, at least about 220, at least about 240, at least about 260, at least about 280, at least about 300, at least about 320, at least about 340, at least about 360, at least about 380, or at least about 400 contiguous amino acids of SEQ ID NO. 283.

[0486] In certain instances, compositions comprise an effector protein and an engineered guide nucleic acid, wherein the amino acid sequence of the effector protein, other than the amino acid alteration at position 458, is at least 65%, at least 70%, at least 75%, at least 80%, at least 85%, at least 90%, at least 95%, at least 97%, or at least 98%, at least 99%, or 100% identical to SEQ ID NO: 284. In certain instances, compositions comprise an effector protein and an engineered guide nucleic acid, wherein the amino acid sequence of the effector protein, other than the amino acid alteration at position 458, comprises at least about 200, at least about 220, at least about 240, at least about 260, at least about 280, at least about 300, at least about 320, at least about 340, at least about 360, at least about 380, or at least about 400 contiguous amino acids of SEQ ID NO. 284.

[0487] In certain instances, compositions comprise an effector protein and an engineered guide nucleic acid, wherein the amino acid sequence of the effector protein, other than the amino acid alteration at position 459, is at least 65%, at least 70%, at least 75%, at least 80%, at least 85%, at least 90%, at least 95%, at least 97%, or at least 98%, at least 99%, or 100% identical to SEQ ID NO: 285. In certain instances, compositions comprise an effector protein and an engineered guide nucleic acid, wherein the amino acid sequence of the effector protein, other than the amino acid alteration at position 459, comprises at least about 200, at least about 220, at least about 240, at least about 260, at least about 280, at least about 300, at least about 320, at least about 340, at least about 360, at least about 380, or at least about 400 contiguous amino acids of SEQ ID NO. 285.

[0488] In certain instances, compositions comprise an effector protein and an engineered guide nucleic acid, wherein the amino acid sequence of the effector protein, other than the amino acid alteration at position 460, is at least 65%, at least 70%, at least 75%, at least 80%, at least 85%, at least 90%, at least 95%, at least 97%, or at least 98%, at least 99%, or 100% identical to SEQ ID NO: 286. In certain instances, compositions comprise an effector protein and an engineered guide nucleic acid, wherein the amino acid sequence of the effector protein, other than the amino acid alteration at position 460, comprises at least about 200, at least about 220, at least about 240, at least about 260, at least about 280, at least about 300, at least about 320, at least about 340, at least about 360, at least about 380, or at least about 400 contiguous amino acids of SEQ ID NO. 286.

[0489] In certain instances, compositions comprise an effector protein and an engineered guide nucleic acid, wherein the amino acid sequence of the effector protein, other than the amino acid alteration at position 461, is at least 65%, at least 70%, at least 75%, at least 80%, at least 85%, at least 90%, at least 95%, at least 97%, or at least 98%, at least 99%, or 100% identical to SEQ ID NO: 287. In certain instances, compositions comprise an effector protein and an engineered guide nucleic acid, wherein the amino acid sequence of the effector protein, other than the amino acid alteration at position 461, comprises at least about 200, at least about 220, at least about 240, at least about 260, at least about 280, at least about 300, at least about 320, at least about 340, at least about 360, at least about 380, or at least about 400 contiguous amino acids of SEQ ID NO. 287.

[0490] In certain instances, compositions comprise an effector protein and an engineered guide nucleic acid, wherein the amino acid sequence of the effector protein, other than the amino acid alteration at position 462, is at least 65%, at least 70%, at least 75%, at least 80%, at least 85%, at least 90%, at least 95%, at least 97%, or at least 98%, at least 99%, or 100% identical to SEQ ID NO: 288. In certain instances, compositions comprise an effector protein and an engineered guide nucleic acid, wherein the amino acid sequence of the effector protein, other than the amino acid alteration at position 462, comprises at least about 200, at least about 220, at least about 240, at least about 260, at least about 280, at least about 300, at least about 320, at least about 340, at least about 360, at least about 380, or at least about 400 contiguous amino acids of SEQ ID NO. 288.

[0491] In certain instances, compositions comprise an effector protein and an engineered guide nucleic acid, wherein the amino acid sequence of the effector protein, other than the amino acid alteration at position 463, is at least 65%, at least 70%, at least 75%, at least 80%, at least 85%, at least 90%, at least 95%, at least 97%, or at least 98%, at least 99%, or 100% identical to SEQ ID NO: 289. In certain instances, compositions comprise an effector protein and an engineered guide nucleic acid, wherein the amino acid sequence of the effector protein, other than the amino acid alteration at position 463, comprises at least about 200, at least about 220, at least about 240, at least about 260, at least about 280, at least about 300, at least about 320, at least about 340, at least about 360, at least about 380, or at least about 400 contiguous amino acids of SEQ ID NO. 289.

[0492] In certain instances, compositions comprise an effector protein and an engineered guide nucleic acid, wherein the amino acid sequence of the effector protein, other than the amino acid alteration at position 464, is at least 65%, at least 70%, at least 75%, at least 80%, at least 85%, at least 90%, at least 95%, at least 97%, or at least 98%, at least 99%, or 100% identical to SEQ ID NO: 290. In certain instances, compositions comprise an effector protein and an engineered guide nucleic acid, wherein the amino acid sequence of the effector protein, other than the amino acid alteration at position 464, comprises at least about 200, at least about 220, at least about 240, at least about 260, at least about 280, at least about 300, at least about 320, at least about 340, at least about 360, at least about 380, or at least about 400 contiguous amino acids of SEQ ID NO. 290.

[0493] In certain instances, compositions comprise an effector protein and an engineered guide nucleic acid, wherein the amino acid sequence of the effector protein, other than the amino acid alteration at position 466, is at least 65%, at least 70%, at least 75%, at least 80%, at least 85%, at least 90%, at least 95%, at least 97%, or at least 98%, at least 99%, or 100% identical to SEQ ID NO: 291. In certain instances, compositions comprise an effector protein and an engineered guide nucleic acid, wherein the amino acid sequence of the effector protein, other than the amino acid alteration at position 466, comprises at least about 200, at least about 220, at least about 240, at least about 260, at least about 280, at least about 300, at least about 320, at least about 340, at least about 360, at least about 380, or at least about 400 contiguous amino acids of SEQ ID NO. 291.

[0494] In certain instances, compositions comprise an effector protein and an engineered guide nucleic acid, wherein the amino acid sequence of the effector protein, other than the amino acid alteration at position 467, is at least 65%, at least 70%, at least 75%, at least 80%, at least 85%, at least 90%, at least 95%, at least 97%, or at least 98%, at least 99%, or 100% identical to SEQ ID NO: 292. In certain instances, compositions comprise an effector protein and an engineered guide nucleic acid, wherein the amino acid sequence of the effector protein, other than the amino acid alteration at position 467, comprises at least about 200, at least about 220, at least about 240, at least about 260, at least about 280, at least about 300, at least about 320, at least about 340, at least about 360, at least about 380, or at least about 400 contiguous amino acids of SEQ ID NO. 292.

[0495] In certain instances, compositions comprise an effector protein and an engineered guide nucleic acid, wherein the amino acid sequence of the effector protein, other than the amino acid alteration at position 468, is at least 65%, at least 70%, at least 75%, at least 80%, at least 85%, at least 90%, at least 95%, at least 97%, or at least 98%, at least 99%, or 100% identical to SEQ ID NO: 293. In certain instances, compositions comprise an effector protein and an engineered guide nucleic acid, wherein the amino acid sequence of the effector protein, other than the amino acid alteration at position 468, comprises at least about 200, at least about 220, at least about 240, at least about 260, at least about 280, at least about 300, at least about 320, at least about 340, at least about 360, at least about 380, or at least about 400 contiguous amino acids of SEQ ID NO. 293.

[0496] In certain instances, compositions comprise an effector protein and an engineered guide nucleic acid, wherein the amino acid sequence of the effector protein, other than the amino acid alteration at position 468, is at least 65%, at least 70%, at least 75%, at least 80%, at least 85%, at least 90%, at least 95%, at least 97%, or at least 98%, at least 99%, or 100% identical to SEQ ID NO: 728. In certain instances, compositions comprise an effector protein and an engineered guide nucleic acid, wherein the amino acid sequence of the effector protein, other than the amino acid alteration at position 468, comprises at least about 200, at least about 220, at least about 240, at least about 260, at least about 280, at least about 300, at least about 320, at least about 340, at least about 360, at least about 380, or at least about 400 contiguous amino acids of SEQ ID NO: 728.

[0497] In certain instances, compositions comprise an effector protein and an engineered guide nucleic acid, wherein the amino acid sequence of the effector protein, other than the amino acid alteration at position 468, is at least 65%, at least 70%, at least 75%, at least 80%, at least 85%, at least 90%, at least 95%, at least 97%, or at least 98%, at least 99%, or 100% identical to SEQ ID NO: 729. In certain instances, compositions comprise an effector protein and an engineered guide nucleic acid, wherein the amino acid sequence of the effector protein, other than the amino acid alteration at position 468, comprises at least about 200, at least about 220, at least about 240, at least about 260, at least about 280, at least about 300, at least about 320, at least about 340, at least about 360, at least about 380, or at least about 400 contiguous amino acids of SEQ ID NO: 729.

[0498] In certain instances, compositions comprise an effector protein and an engineered guide nucleic acid, wherein the amino acid sequence of the effector protein, other than the amino acid alteration at position 468, is at least 65%, at least 70%, at least 75%, at least 80%, at least 85%, at least 90%, at least 95%, at least 97%, or at least 98%, at least 99%, or 100% identical to SEQ ID NO: 730. In certain instances, compositions comprise an effector protein and an engineered guide nucleic acid, wherein the amino acid sequence of the effector protein, other than the amino acid alteration at position 468, comprises at least about 200, at least about 220, at least about 240, at least about 260, at least about 280, at least about 300, at least about 320, at least about 340, at least about 360, at least about 380, or at least about 400 contiguous amino acids of SEQ ID NO: 730.

[0499] In certain instances, compositions comprise an effector protein and an engineered guide nucleic acid, wherein the amino acid sequence of the effector protein, other than the amino acid alteration at position 468, is at least 65%, at least 70%, at least 75%, at least 80%, at least 85%, at least 90%, at least 95%, at least 97%, or at least 98%, at least 99%, or 100% identical to SEQ ID NO: 731. In certain instances, compositions comprise an effector protein and an engineered guide nucleic acid, wherein the amino acid sequence of the effector protein, other than the amino acid alteration at position 468, comprises at least about 200, at least about 220, at least about 240, at least about 260, at least about 280, at least about 300, at least about 320, at least about 340, at least about 360, at least about 380, or at least about 400 contiguous amino acids of SEQ ID NO: 731.

[0500] In some embodiments, effector proteins provided herein are a variant of a reference polypeptide, wherein the reference polypeptide has an amino acid sequence of SEQ ID NO: 23, and the effector protein comprises one or more amino acid alterations. In some embodiments, effector proteins provided herein are a variant of a reference polypeptide, wherein the reference polypeptide has an amino acid sequence of SEQ ID NO: 23, and the effector protein comprises one or more conservative or non-conservative amino acid alterations. In some embodiments, effector proteins provided herein are a variant of a reference polypeptide, wherein the reference polypeptide has an amino acid sequence of SEQ ID NO: 23, and the effector protein comprises one or more amino acid alterations comprising substitutions, deletions, insertions, or any combination thereof. In some embodiments, effector proteins provided herein are a variant of a reference polypeptide, wherein the reference polypeptide has an amino acid sequence of SEQ ID NO: 23, and the effector protein comprises one or more amino acid alterations that are conservative amino acid alterations. In some embodiments, effector proteins provided herein are a variant of a reference polypeptide, wherein the reference polypeptide has an amino acid sequence of SEQ ID NO: 23, and the effector protein comprises one or more amino acid alterations that are non-conservative amino acid alterations.

[0501] In some instances, an effector protein disclosed herein comprises an amino acid sequence that is at least about 80%, at least about 85%, at least about 90%, at least about 95%, at least about 98%, at least about 99%, or about 100% identical to SEQ ID NO: 23 and comprises at least one amino acid alteration relative to SEQ ID NO: 23. In some instances, an effector protein disclosed herein comprises an amino acid sequence that is at least about 80%, at least about 85%, at least about 90%, at least about 95%, at least about 98%, at least about 99%, or about 100% identical to SEQ ID NO: 23 and comprises at least one conservative amino acid alteration relative to SEQ ID NO: 23. In some instances, an effector protein disclosed herein comprises an amino acid sequence that is at least about 80%, at least about 85%, at least about 90%, at least about 95%, at least about 98%, at least about 99%, or about 100% identical to identical to SEQ ID NO: 23 and comprises at least one non-conservative amino acid alteration relative to SEQ ID NO: 23. In some instances, an effector protein disclosed herein comprises an amino acid sequence that is at least about 80%, at least about 85%, at least about 90%, at least about 95%, at least about 98%, at least about 99%, or about 100% identical to SEQ ID NO: 23, wherein all but 1, 2, 3, 4, 5, 6, 7, 8, 9 or 10 amino acids alterations relative to SEQ ID NO: 23 are conservative amino acid substitutions. In some instances, an effector protein disclosed herein comprises an amino acid sequence that is at least about 80%, at least about 85%, at least about 90%, at least about 95%, at least about 98%, at least about 99%, or about 100% identical to SEQ ID NO: 23, wherein all but 1, 2, 3, 4, 5, 6, 7, 8, 9 or 10 amino acids alterations relative to SEQ ID NO: 23 are non-conservative amino acid substitutions. In some instances, an effector protein disclosed herein comprises an amino acid sequence that is identical to SEQ ID NO: 23 with the exception of 1, 2, 3, 4, 5, 6, 7, 8, 9 or 10 conservative amino acid alterations. In some instances, an effector protein disclosed herein comprises an amino acid sequence that is identical to SEQ ID NO: 23 with the exception of 1, 2, 3, 4, 5, 6, 7, 8, 9 or 10 non-conservative amino acid alterations.

[0502] In some embodiments, the D2S effector protein comprises one or more amino acid alteration in a domain of the D2S effector protein, wherein the D2S effector protein comprises a RuvC domain, a REC domain, or a zinc finger domain, or any combination thereof. In certain embodiments, the RuvC domain comprises RuvC-I, RuvC-II, RuvC-III subdomains, or any combination thereof. In certain embodiments, the D2S effector protein comprises one or more amino acid alteration in a RuvC subdomain, or the REC domain. In certain embodiments, the D2S effector protein comprises one or more amino acid alteration in the RuvC-I subdomain, the RuvC-II subdomain, or the REC domain. In certain embodiments, the D2S effector protein comprises one or more amino acid alteration in the RuvC-I subdomain. In certain embodiments, the D2S effector protein comprises one or more amino acid alteration in the RuvC-II subdomain. In certain embodiments, the D2S effector protein comprises one or more amino acid alteration in the REC domain. In certain embodiments, the D2S effector protein comprises one or more amino acid alteration in a domain of SEQ ID NO: 23. In certain embodiments, the D2S effector protein comprises one or more amino acid alteration in the RuvC-I subdomain, the RuvC-II subdomain, or the REC domain of SEQ ID NO: 23.

[0503] In some embodiments, the D2S effector protein comprises one or more amino acid alteration at a position corresponding to the residue at 110, 111, 112, 113, 114, 115, 116, 117, 118, 119, 122, 123, 124, 125, 126, 127, 128, 129, 130, 131, 132, or any combination thereof in the REC domain of SEQ ID NO: 23. In some embodiments, the D2S effector protein comprises one or more amino acid alteration at a position corresponding to the residue at 261, 263, 264, 265, 266, 267, 268, 269, 270, 271, 272, 273, 274, 275, 276, 277, 278, 279, 280, 281, 282, or any combination thereof in the RuvC-I domain of SEQ ID NO: 23. In some embodiments, the D2S effector protein comprises one or more amino acid alteration at a position corresponding to the residue at 457, 458, 459, 460, 461, 462, 463, 464, 466, 467, 468, or any combination thereof in the RuvC-II domain of SEQ ID NO: 23. In some embodiments, the amino acid alteration is an arginine substitution.

[0504] In some embodiments, the D2S effector protein comprises one or more amino acid alteration T115R, T124R, L126R, E127R, T128R, N129R, A132R, or any combination thereof in a REC domain of SEQ ID NO: 23. In some embodiments, the D2S effector protein comprises one or more amino acid alteration K261R, V263R, T278R, T281R, E282R, or any combination thereof in a RuvC-I domain of SEQ ID NO: 23. In some embodiments, the D2S effector protein comprises one or more amino acid alteration N459R, S460R, D462R, K466R, N467R, E468R, or any combination thereof in a RuvC-II domain of SEQ ID NO: 23. In some embodiments, the D2S effector protein comprises one or more amino acid alteration at a position corresponding to one or more residue D267A, E363Q, or any combination thereof. In some embodiments, the D2S effector protein comprises one or more amino acid alteration at a position corresponding to one or more residue D267N, E363Q, or any combination thereof.

[0505] In some embodiments, to provide a D2S effector protein variant, a D2S effector protein disclosed herein is selected as a template or parent sequence. Variants can be created by introducing one or more amino acid alteration (e.g., a substitution) into the template or parent sequence. The variants can be screened to identify those that have increased activity and/or specificity for their substrates. For example, a D2S effector protein variant is screened to identify those alterations leading to increased activity or specificity for the parent D2S effector protein's substrate or substrates.

[0506] For the purpose of amino acid position numbering, in some embodiments, SEQ ID NO: 23 is used as the reference sequence. Therefore, for example, mention of amino acid position 278 in reference to SEQ ID NO: 23, but in the context of a variant sequence, the corresponding amino acid position for variant creation may have the same or different position number, (e.g., 277, 278, or 279). In some cases, the original amino acid and its position on the SEQ ID NO: 23 reference sequence will precisely correlate with the amino acid and position on the variant sequence. In other cases, the original amino acid and its position on the SEQ ID NO: 23 reference sequence will correlate with the original amino acid, but its position on the variant will not be in the corresponding template position. However, the corresponding amino acid on the variant can be a predetermined distance from the position on the template, such as within 10, 9, 8, 7, 6, 5, 4, 3, 2, or 1 amino acid positions from the reference template position. In other cases, the original amino acid on the SEQ ID NO: 23 reference sequence will not precisely correlate with the amino acid on the variant. However, one can understand what the corresponding amino acid on the variant sequence is based on the general location of the amino acid on the template and the sequence of amino acids in the vicinity of the variant amino acid.

[0507] In certain instances, a variant D2S effector protein has an increased nuclease activity as compared to the nuclease activity of the corresponding parent sequence of SEQ ID NO: 23. In some embodiments, a variant D2S effector protein has a nuclease activity that is at least 0.25 fold, at least 0.5 fold, at least 0.75 fold, at least 1 fold, at least 1.25 fold, 1.5 fold, at least 2 fold, at least 5 fold, at least 10 fold, at least 25 fold, or 0.25-25 fold as compared to the nuclease activity of the corresponding parent sequence of SEQ ID NO: 23.

[0508] An effector protein may be small, which may be beneficial for nucleic acid detection or editing (for example, the effector protein may be less likely to adsorb to a surface or another biological species due to its small size). The smaller nature of these effector proteins may allow for them to be more easily packaged and delivered with higher efficiency in the context of genome editing and more readily incorporated as a reagent in an assay. In some instances, the length of the effector protein is less than 400 amino acids. In some instances, the length of the effector protein is at least 368 amino acids. In some instances, the length of the effector protein is 368 to 378, 368 to 398, or 368 to 400 amino acids. In some instances, the length of the effector protein is at least 400 linked amino acid residues. In some instances, the length of the effector protein is less than 500 linked amino acid residues. In some instances, the length of the effector protein is about 400 to about 500 linked amino acid residues. In some instances, the length of the effector protein is about 380 to about 850 linked amino acid residues. In some instances, the length of the effector protein is about 300 to about 700 linked amino acid residues. In some instances, the length of the effector protein is about 450 to about 550, about 330 to about 600, about 380 to about 500, about 400 to about 420, about 420 to about 440, about 440 to about 460, about 460 to about 480, about 480 to about 500, about 500 to about 520, about 520 to about 540, about 540 to about 560, about 560 to about 580, about 580 to about 600, about 600 to about 620, about 620 to about 640, about 640 to about 660, about 660 to about 680, about 680 to about 700 linked amino acids. In some cases, a linked amino acids comprises at least two amino acids linked by an amide bond.

[0509] In some instances, the effector proteins function as an endonuclease that catalyzes cleavage within a target nucleic acid. In some instances, the effector proteins are capable of catalyzing non-sequence-specific cleavage of a single stranded nucleic acid. In some instances, the effector proteins (e.g., the effector proteins having SEQ ID NOs: 1-45, 202-293) are activated to perform trans cleavage activity after binding of a guide nucleic acid with a target nucleic acid. This trans cleavage activity may also be referred to as “collateral” or “transcollateral” cleavage. Trans cleavage activity may be non-specific cleavage of nearby single-stranded nucleic acid by the activated effector protein, such as trans cleavage of detector nucleic acids with a detection moiety.

[0510] Effector proteins disclosed herein may function as an endonuclease that catalyzes cleavage at a specific position (e.g., at a specific nucleotide within a nucleic acid sequence) in a target nucleic acid. The target nucleic acid may be single stranded RNA (ssRNA), double stranded DNA (dsDNA) or single-stranded DNA (ssDNA). In some instances, the target nucleic acid is single-stranded DNA. In some instances, the target nucleic acid is single-stranded RNA. The effector proteins may provide cis cleavage activity, trans cleavage activity, nickase activity, or a combination thereof. Cis cleavage activity is cleavage of a target nucleic acid that is hybridized to a guide RNA (e.g., a dual gRNA or a sgRNA), wherein cleavage occurs within or directly adjacent to the region of the target nucleic acid that is hybridized to guide RNA. Trans cleavage activity (also referred to as transcollateral cleavage) is cleavage of ssDNA or ssRNA that is near, but not hybridized to the guide RNA. Trans cleavage activity is triggered by the hybridization of guide RNA to the target nucleic acid. Nickase activity is a selective cleavage of one strand of a dsDNA. While certain effector proteins may be used to edit and detect nucleic acids in a sequence specific manner, challenging biological sample conditions (e.g., high viscosity, metal chelating) may limit their accuracy and effectiveness. There is thus a need for systems and methods that employ effector proteins having specificity and efficiency across a wide range of sample conditions.

[0511] Effector proteins of the present disclosure, dimers thereof, and multimeric complexes thereof may cleave or nick a target nucleic acid within or near a protospacer adjacent motif (PAM) sequence of the target nucleic acid. In some embodiments, a PAM is a nucleotide sequence found in a target nucleic acid that directs an effector protein to modify the target nucleic acid at a specific location. In some cases, a PAM sequence may be required for a complex having an effector protein and a guide nucleic acid to hybridize to and modify the target nucleic acid. However, a given effector protein may not require a PAM sequence being present in a target nucleic acid for the effector protein to modify the target nucleic acid. In some instances, cleavage occurs within 1, 2, 3, 4, 5, 6, 7, 8, 9 or 10 nucleosides of a 5′ or 3′ terminus of a PAM sequence. A target nucleic acid may comprise a PAM sequence adjacent to a sequence that is complementary to a guide nucleic acid spacer region. In some instances, the effector protein recognizes a PAM as shown in TABLE 6. In some instances, a composition comprising an effector protein recognizes a PAM sequence comprising any of the following nucleotide sequences: CTT (SEQ ID NO: 154), CC (SEQ ID NO: 155), TCG (SEQ ID NO: 156), GCG (SEQ ID NO: 157), TTG (SEQ ID NO: 158), GTG (SEQ ID NO: 159), ATTA (SEQ ID NO: 160), ATTG (SEQ ID NO: 161), GTTA (SEQ ID NO: 162), GTTG (SEQ ID NO: 163), TC (SEQ ID NO: 164), ACTG (SEQ ID NO: 165), GCTG (SEQ ID NO: 166), TTC (SEQ ID NO: 167), or TTT (SEQ ID NO: 168) as shown in TABLE 6. In some instances, the effector protein recognizes a PAM set forth in FIG. 1.

[0512] In some instances, the effector protein recognizes a PAM as shown in TABLE 13. In some instances, the effector protein recognizes a PAM as shown in TABLE 14. In some instances, the effector protein recognizes a PAM as shown in TABLE 16. In some instances, the effector protein recognizes a PAM as shown in TABLE 17. In some instances, the effector protein recognizes a PAM as shown in TABLE 20. In some instances, the effector protein recognizes a PAM as shown in TABLE 21. In some instances, the effector protein recognizes a PAM as shown in TABLE 22. In some instances, the effector protein recognizes a PAM as shown in TABLE 23. In some instances, the PAM sequence comprises a sequence listed in TABLE 24. In some instances, the PAM sequence comprises a sequence listed in TABLE 35. In some instances, the effector protein recognizes a PAM set forth in FIGS. 7A-7E. In some instances, the effector protein recognizes a PAM of SEQ ID NOs: 368, 369, 370, 371. In some instances, the effector protein recognizes a PAM of SEQ ID NOs: 304, 312, 313, 315, 324 or 335. In some instances, the effector protein recognizes a PAM of SEQ ID NOs: 301, 318, 335, 343, 360, or 365. In some instances, the effector protein recognizes a PAM of SEQ ID NOs: 368. In some instances, the effector protein recognizes a PAM of SEQ ID NOs: 343. In some instances, the effector protein recognizes a PAM of SEQ ID NOs: 325, 326, 327, or 328. In some embodiments, effector proteins do not require a PAM sequence to cleave or a nick a target nucleic acid.

[0513] In some instances, the effector protein comprises six amino acid sequences selected from the group comprising: (i) an amino acid sequence that is at least 60%, at least 70%, at least 80%, at least 90%, at least 95%, at least 98%, at least 99% or 100% identical to SEQ ID NO: 793 (shown in Table 32), (ii) an amino acid sequence that is at least 60%, at least 70%, at least 80%, at least 90%, at least 95%, at least 98%, at least 99% or 100% identical to SEQ ID NO: 794 (shown in Table 32), (iii) an amino acid sequence that is at least 60%, at least 70%, at least 80%, at least 90%, at least 95%, at least 98%, at least 99% or 100% identical to SEQ ID NO: 795 (shown in Table 32), (iv) an amino acid sequence that is at least 60%, at least 70%, at least 80%, at least 90%, at least 95%, at least 98%, at least 99% or 100% identical to SEQ ID NO: 796 (shown in Table 32), (v) an amino acid sequence that is at least 60%, at least 70%, at least 80%, at least 90%, at least 95%, at least 98%, at least 99% or 100% identical to SEQ ID NO: 797 (shown in Table 32), (vi) an amino acid sequence that is at least 60%, at least 70%, at least 80%, at least 90%, at least 95%, at least 98%, at least 99% or 100% identical to SEQ ID NO: 798 (shown in Table 32), and (vii) an amino acid sequence that is at least 60%, at least 70%, at least 80%, at least 90%, at least 95%, at least 98%, at least 99% or 100% identical to SEQ ID NO: 799 (shown in Table 32).

[0514] MEME_1 to MEME_7 are PROSITE motifs, a format which is routinely used in the art to describe a consensus sequence. For example, the PROSITE sequence [NH]AD corresponds to the sequences NAD and HAD. When an amino acid sequence is analysed to calculate the degree of identity to the PROSITE sequence [NH]AD, both NAD and HAD are given equal weight. In other words, both NAD and HAD share 100% identity with the PROSITE motif [NH]AD.

[0515] In some instances, the effector protein comprises seven amino acid sequences selected from the group: (i) an amino acid sequence that is at least 40%, at least 50%, at least 60%, at least 70%, at least 80%, at least 90%, at least 95%, at least 98%, at least 99% or 100% identical to SEQ ID NO: 793, (ii) an amino acid sequence that is at least 40%, at least 50%, at least 60%, at least 70%, at least 80%, at least 90%, at least 95%, at least 98%, at least 99% or 100% identical to SEQ ID NO: 794, (iii) an amino acid sequence that is at least 40%, at least 50%, at least 60%, at least 70%, at least 80%, at least 90%, at least 95%, at least 98%, at least 99% or 100% identical to SEQ ID NO: 795, (iv) an amino acid sequence that is at least 40%, at least 50%, at least 60%, at least 70%, at least 80%, at least 90%, at least 95%, at least 98%, at least 99% or 100% identical to SEQ ID NO: 796, (v) an amino acid sequence that is at least 40%, at least 50%, at least 60%, at least 70%, at least 80%, at least 90%, at least 95%, at least 98%, at least 99% or 100% identical to SEQ ID NO: 797, (vi) an amino acid sequence that is at least 40%, at least 50%, at least 60%, at least 70%, at least 80%, at least 90%, at least 95%, at least 98%, at least 99% or 100% identical to SEQ ID NO: 798, and (vii) an amino acid sequence that is at least 40%, at least 50%, at least 60%, at least 70%, at least 80%, at least 90%, at least 95%, at least 98%, at least 99% or 100% identical to SEQ ID NO: 799.

[0516] In preferred embodiments, the effector protein comprises six amino acid sequences selected from the group: (i) an amino acid sequence that is at least 69.5% identical to SEQ ID NO: 793, (ii) an amino acid sequence that is at least 69.5% identical to SEQ ID NO: 794, (iii) an amino acid sequence that is at least 69.5% identical to SEQ ID NO: 795, (iv) an amino acid sequence that is at least 69.5% identical to SEQ ID NO: 796, (v) an amino acid sequence that is at least 69.5% identical to SEQ ID NO: 797, (vi) an amino acid sequence that is at least 69.5% identical to SEQ ID NO: 798, and (vii) an amino acid sequence that is at least 69.5% identical to SEQ ID NO: 799. In further preferred embodiments, the effector protein comprises six amino acid sequences selected from the group: (i) an amino acid sequence that is at least 80% identical to SEQ ID NO: 793, (ii) an amino acid sequence that is at least 80% identical to SEQ ID NO: 794, (iii) an amino acid sequence that is at least 80% identical to SEQ ID NO: 795, (iv) an amino acid sequence that is at least 80% identical to SEQ ID NO: 796, (v) an amino acid sequence that is at least 80% identical to SEQ ID NO: 797, (vi) an amino acid sequence that is at least 80% identical to SEQ ID NO: 798, and (vii) an amino acid sequence that is at least 80% identical to SEQ ID NO: 799.

[0517] In some instances, the effector protein comprises an amino acid sequence that is (1) at least 50%, at least 60%, at least 70%, at least 75%, at least 80%, at least 85%, at least 90%, at least 95%, at least 98%, at least 99% or 100% identical to SEQ ID NO: 23, preferably at least 68% identical to SEQ ID NO: 23, and (2) includes six amino acid sequences selected from the group: (i) an amino acid sequence that is at 69.5% identical to SEQ ID NO: 793, (ii) an amino acid sequence that is at 69.5% identical to SEQ ID NO: 794, (iii) an amino acid sequence that is at 69.5% identical to SEQ ID NO: 795, (iv) an amino acid sequence that is at 69.5% identical to SEQ ID NO: 796, (v) an amino acid sequence that is at 69.5% identical to SEQ ID NO: 797, (vi) an amino acid sequence that is at 69.5% identical to SEQ ID NO: 798, and (vii) an amino acid sequence that is at 69.5% identical to SEQ ID NO: 799.

[0518] In some instances, the effector protein comprises an amino acid sequence that is (1) at least 50%, at least 60%, at least 70%, at least 75%, at least 80%, at least 85%, at least 90%, at least 95%, at least 98%, at least 99% or 100% identical to SEQ ID NO: 23 and (2) includes six amino acid sequences selected from the group comprising: (i) an amino acid sequence that is at least 60%, at least 70%, at least 80%, at least 90%, at least 95%, at least 98%, at least 99% or 100% identical to SEQ ID NO: 793, (ii) an amino acid sequence that is at least 60%, at least 70%, at least 80%, at least 90%, at least 95%, at least 98%, at least 99% or 100% identical to SEQ ID NO: 794, (iii) an amino acid sequence that is at least 60%, at least 70%, at least 80%, at least 90%, at least 95%, at least 98%, at least 99% or 100% identical to SEQ ID NO: 795, (iv) an amino acid sequence that is at least 60%, at least 70%, at least 80%, at least 90%, at least 95%, at least 98%, at least 99% or 100% identical to SEQ ID NO: 796, (v) an amino acid sequence that is at least 60%, at least 70%, at least 80%, at least 90%, at least 95%, at least 98%, at least 99% or 100% identical to SEQ ID NO: 797, (vi) an amino acid sequence that is at least 60%, at least 70%, at least 80%, at least 90%, at least 95%, at least 98%, at least 99% or 100% identical to SEQ ID NO: 798, and (vii) an amino acid sequence that is at least 60%, at least 70%, at least 80%, at least 90%, at least 95%, at least 98%, at least 99% or 100% identical to SEQ ID NO: 799.

[0519] In some preferred embodiments, the effector protein comprises an amino acid sequence that is (1) at least 68% identical to SEQ ID NO:23, and (2) includes six amino acid sequences selected from the group: (i) an amino acid sequence that is at least 69.5% identical to SEQ ID NO: 793, (ii) an amino acid sequence that is at least 69.5% identical to SEQ ID NO: 794, (iii) an amino acid sequence that is at least 69.5% identical to SEQ ID NO: 795, (iv) an amino acid sequence that is at least 69.5% identical to SEQ ID NO: 796, (v) an amino acid sequence that is at least 69.5% identical to SEQ ID NO: 797, (vi) an amino acid sequence that is at least 69.5% identical to SEQ ID NO: 798, and (vii) an amino acid sequence that is at least 69.5% identical to SEQ ID NO: 799.

[0520] In some instances, the effector protein comprises an amino acid sequence that is at least 37%, at least 40%, at least 50%, at least 60%, at least 70%, at least 80%, at least 90%, at least 95%, at least 98%, at least 99% or 100% identical to SEQ ID NO: 796.

[0521] In some instances, the effector protein comprises (1) an amino acid sequence that is at least 37%, at least 40%, at least 50%, at least 60%, at least 70%, at least 80%, at least 90%, at least 95%, at least 98%, at least 99% or 100% identical to SEQ ID NO: 796, and (2) four amino acid sequences selected from the group: (i) an amino acid sequence that is at least 60%, at least 70%, at least 80%, at least 90%, at least 95%, at least 98%, at least 99% or 100% identical to SEQ ID NO: 793, (ii) an amino acid sequence that is at least 60%, at least 70%, at least 80%, at least 90%, at least 95%, at least 98%, at least 99% or 100% identical to SEQ ID NO: 794, (iii) an amino acid sequence that is at least 60%, at least 70%, at least 80%, at least 90%, at least 95%, at least 98%, at least 99% or 100% identical to SEQ ID NO: 795, (iv) an amino acid sequence that is at least 60%, at least 70%, at least 80%, at least 90%, at least 95%, at least 98%, at least 99% or 100% identical to SEQ ID NO: 797, (v) an amino acid sequence that is at least 60%, at least 70%, at least 80%, at least 90%, at least 95%, at least 98%, at least 99% or 100% identical to SEQ ID NO: 798, and (vi) an amino acid sequence that is at least 60%, at least 70%, at least 80%, at least 90%, at least 95%, at least 98%, at least 99% or 100% identical to SEQ ID NO: 799. In some further instances, the effector protein comprises an amino acid sequence that is at least 50%, at least 60%, at least 70%, at least 75%, at least 80%, at least 85%, at least 90%, at least 95%, at least 98%, at least 99% or 100% identical to SEQ ID NO: 23, preferably wherein the amino acid sequence is at least 68% identical to SEQ ID NO:23.

[0522] In some instances, the effector protein comprises (1) an amino acid sequence that is at least 37%, at least 40%, at least 50%, at least 60%, at least 70%, at least 80%, at least 90%, at least 95%, at least 98%, at least 99% or 100% identical to SEQ ID NO: 796, and (2) four amino acid sequences selected from the group: (i) an amino acid sequence that is at least 69.5% identical to SEQ ID NO: 793, (ii) an amino acid sequence that is at least 69.5% identical to SEQ ID NO: 794, (iii) an amino acid sequence that is at least 69.5% identical to SEQ ID NO: 795, (iv) an amino acid sequence that is at least 69.5% identical to SEQ ID NO: 797, (v) an amino acid sequence that is at least 69.5% identical to SEQ ID NO: 798, and (vi) an amino acid sequence that is at least 69.5% identical to SEQ ID NO: 799. In some further instances, the effector protein comprises an amino acid sequence that is at least 50%, at least 60%, at least 70%, at least 75%, at least 80%, at least 85%, at least 90%, at least 95%, at least 98%, at least 99% or 100% identical to SEQ ID NO: 23, preferably wherein the amino acid sequence is at least 68% identical to SEQ ID NO:23.

[0523] In some instances, the effector protein comprises one or more of: (i) an amino acid sequence that is at least 80%, preferably at least 90%, identical to SEQ ID NO: 793, (ii) an amino acid sequence that is at least 80%, preferably at least 90%, identical to SEQ ID NO: 794, (iii) an amino acid sequence that is at least 80%, preferably at least 90%, identical to SEQ ID NO: 795, (iv) an amino acid sequence that is at least 80%, preferably at least 90%, identical to SEQ ID NO: 796, (v) an amino acid sequence that is at least 80%, preferably at least 90%, identical to SEQ ID NO: 797, (vi) an amino acid sequence that is at least 80%, preferably at least 90%, identical to SEQ ID NO: 798, and (vii) an amino acid sequence that is at least 80%, preferably at least 90%, identical to SEQ ID NO: 799.

[0524] In some instances, the effector proteins comprises amino acid sequences that have at least a threshold identity referred to herein to any one of SEQ ID NO: 793 to SEQ ID NO: 799 and the amino acid sequences are in the following order, starting from the N-terminus: (i) the sequence having at least the threshold identity with SEQ ID NO: 796, (ii) the sequence having at least the threshold identity with SEQ ID NO: 797, (iii) the sequence having at least the threshold identity with SEQ ID NO: 795, (iv) the sequence having at least the threshold identity with SEQ ID NO: 799, (v) the sequence having at least the threshold identity with SEQ ID NO: 794, (vi) the sequence having at least the threshold identity with SEQ ID NO: 793, and (vii) the sequence having at least the threshold identity with SEQ ID NO: 798. In some instances, the effector protein does not include an amino acid that meets a specified degree of identity (i.e. the threshold identity) with any one of SEQ ID NO: 793 to SEQ ID NO: 799. For example, in some instances, the effector protein does not include an amino acid sequence having 36.5% or more identity with SEQ ID NO: 796, and the effector protein comprises, distributed through the protein starting from the N-terminus, (i) a sequence having at least the threshold identity with SEQ ID NO: 797, (ii) a sequence having at least the threshold identity with SEQ ID NO: 795, (iii) a sequence having at least the threshold identity with SEQ ID NO: 799, (iv) a sequence having at least the threshold identity with SEQ ID NO: 794, (v) a sequence having at least the threshold identity with SEQ ID NO: 793, and (vi) a sequence having at least the threshold identity with SEQ ID NO: 798.

[0525] In some instances, effector proteins have been modified. In some embodiments, D2S effector proteins disclosed herein or a variant thereof may comprise an NLS. In some cases, an NLS comprises an entity (e.g., peptide) that facilitates localization of a nucleic acid, protein, or small molecule to the nucleus, when present in a cell that contains a nuclear compartment. An NLS can be located at or near the amino terminus (N-terminus) of the D2S effector proteins disclosed herein. An NLS can be located at or near the carboxy terminus (C-terminus) of the D2S effector proteins disclosed herein. In some embodiments, a vector encodes the D2S effector proteins described herein, wherein the vector or vector systems disclosed herein comprises one or more NLSs, such as about or more than about 1, 2, 3, 4, 5, 6, 7, 8, 9, 10, or more NLSs. In some embodiments, a D2S effector protein described herein comprises 1, 2, 3, 4, 5, 6, 7, 8, 9, 10, or more NLSs at or near the N-terminus, 1, 2, 3, 4, 5, 6, 7, 8, 9, 10, or more NLSs at or near the C-terminus, or a combination of these (e.g. one or more NLS at the amino-terminus and one or more NLS at the carboxy terminus). When more than one NLS is present, each may be selected independently of the others, such that a single NLS may be present in more than one copy and/or in combination with one or more other NLSs present in one or more copies. In some embodiments, an NLS is considered near the N- or C-terminus when the nearest amino acid of the NLS is within about 1, 2, 3, 4, 5, 10, 15, 20, 25, 30, 40, 50, or more amino acids along the polypeptide chain from the N- or C-terminus.

[0526] In certain embodiments, the nucleotide sequence encoding the effector protein is codon optimized (e.g., for expression in a eukaryotic cell) relative to the naturally occurring sequence. In some embodiments, D2S effector proteins described herein are encoded by a codon optimized nucleic acid. In some embodiments, a nucleic acid sequence encoding a D2S effector protein described herein is codon optimized. This type of optimization can entail a mutation of a D2S effector protein encoding nucleotide sequence to mimic the codon preferences of the intended host organism or cell while encoding the same polypeptide. Thus, the codons can be changed, but the encoded protein remains unchanged. For example, if the intended target cell was a human cell, a human codon-optimized D2S effector protein-encoding nucleotide sequence could be used. As another non-limiting example, if the intended host cell were a mouse cell, then a mouse codon-optimized D2S effector protein-encoding nucleotide sequence could be generated. As another non-limiting example, if the intended host cell were a eukaryotic cell, then a eukaryote codon-optimized D2S effector protein nucleotide sequence could be generated. As another non-limiting example, if the intended host cell were a prokaryotic cell, then a prokaryote codon-optimized D2S effector protein-encoding nucleotide sequence could be generated. Codon usage tables are readily available, for example, at the “Codon Usage Database” available at www.kazusa.or.jp/codon. Effector proteins may be codon optimized for expression in a specific cell, for example, a bacterial cell, a plant cell, a eukaryotic cell, an animal cell, a mammalian cell, or a human cell. In some embodiments, the effector protein is codon optimized for a human cell.

[0527] It is understood that when describing coding sequences of polypeptides described herein, said coding sequences do not necessarily require a codon encoding a N-terminal Methionine (M) or a Valine (V) as described for the D2S effector proteins described herein. One skilled in the art would understand that a start codon could be replaced or substituted with a start codon that encodes for an amino acid residue sufficient for initiating translation in a host cell. In some instances, when a modifying heterologous peptide, such as a fusion protein partner is located at the N terminus of the effector protein, a start codon for the fusion protein partner serves as a start codon for the effector protein as well. Thus, the natural start codon encoding an amino acid residue sufficient for initiating translation (e.g., Methionine (M) or a Valine (V)) of the effector protein may be removed or absent.

[0528] In some cases, compositions comprise a D2S effector protein and a cell. In some embodiments, compositions comprise a cell that expresses a D2S effector protein. In some cases, compositions comprise a nucleic acid encoding a D2S effector protein and a cell. In some embodiments, compositions comprise a cell expressing a nucleic acid encoding a D2S effector protein. In some instances, the cell is a prokaryotic cell. In some instances, the cell is a eukaryotic cell. In some instances, the cell is a mammalian cell.

[0529] D2S effector proteins of the present disclosure may be produced in vitro or by eukaryotic cells or by prokaryotic cells. D2S effector proteins can be further processed by unfolding, e.g. heat denaturation, dithiothreitol reduction, etc. and may be further refolded, using any suitable method. D2S effector proteins of the present disclosure of the present disclosure may be synthesized, using any suitable method.

[0530] In some embodiments, D2S effector proteins described herein can be isolated and purified for use in compositions, systems, and/or methods described herein. Methods described here can include the step of isolating D2S effector proteins described herein. Compositions and/or systems described herein can further comprise a purification tag that can be attached to a D2S effector protein, or a nucleic acid encoding for a purification tag that can be attached to a nucleic acid encoding for a D2S effector protein as described herein. A purification tag, as used herein, can be an amino acid sequence which can attach or bind with high affinity to a separation substrate and assist in isolating the protein of interest from its environment, which can be its biological source, such as a cell lysate. Attachment of the purification tag can be at the N or C terminus of the D2S effector protein. In some instances when a purification tag located at the N terminus of the effector protein, a start codon for the purification tag serves as a start codon for the effector protein as well. Thus, the natural start codon of the effector protein may be removed or absent. Furthermore, an amino acid sequence recognized by a protease or a nucleic acid encoding for an amino acid sequence recognized by a protease, such as TEV protease or the HRV3C protease can be inserted between the purification tag and the D2S effector protein, such that biochemical cleavage of the sequence with the protease after initial purification liberates the purification tag. Purification and/or isolation can be through high performance liquid chromatography (HPLC), exclusion chromatography, gel electrophoresis, affinity chromatography, or other purification technique. Non-limiting examples of purification tags include a histidine tag, e.g., a 6×His tag; a hemagglutinin (HA) tag; a FLAG tag; a Myc tag; and maltose binding protein (MBP). In some embodiments, an effector protein is fused or linked (e.g., via an amide bond) to a fluorescent protein. Non-limiting examples of fluorescent proteins include green fluorescent protein (GFP), yellow fluorescent protein (YFP), red fluorescent protein (RFP), cyan fluorescent protein (CFP), mCherry, and tdTomato.

[0531] For example, in some embodiments, D2S effector proteins described herein are isolated from cell lysate. In some embodiments, the compositions described herein can comprise 20% or more by weight, 75% or more by weight, 95% or more by weight, or 99.5% or more by weight of a D2S effector protein, related to the method of preparation of compositions described herein and its purification thereof, wherein percentages can be upon total protein content in relation to contaminants. Thus, in some cases, a D2S effector protein described herein is at least 80% pure, at least 85% pure, at least 90% pure, at least 95% pure, at least 98% pure, or at least 99% pure (e.g., free of contaminants, non-engineered polypeptide proteins or other macromolecules, etc.).

### Engineered Proteins

[0532] In some instances, effector proteins disclosed herein are engineered proteins. Engineered proteins are not identical to a naturally-occurring protein. Such an engineered protein can include one or more mutations, including an insertion, deletion or substitution (e.g., conservative or non-conservative substitution). An engineered protein, in some embodiments, includes at least one mutation relative to a reference protein (e.g., a naturally-occurring protein). In some embodiments, an engineered protein includes at least 1, at least 2, at least 3, at least 4, at least 5, at least 6, at least 7, at least 8, at least 9, at least 10, at least 15, at least 20, at least 25 or at least 30 mutations relative to a reference protein (e.g., a naturally-occurring protein). In some embodiments, an engineered protein includes no more than 10, 20, 30, 40, or 50 mutations relative to a reference protein (e.g., a naturally-occurring protein). Engineered proteins may provide enhanced nuclease or nickase activity as compared to a naturally occurring nuclease or nickase. By way of non-limiting example, some engineered proteins exhibit optimal activity at lower salinity and viscosity than the protoplasm of their bacterial cell of origin. Also, by way of non-limiting example, bacteria often comprise protoplasmic salt concentrations greater than 250 mM and room temperature intracellular viscosities above 2 centipoise, whereas engineered proteins exhibit optimal activity (e.g., cis-cleavage activity) at salt concentrations below 150 mM and viscosities below 1.5 centipoise. The present disclosure leverages these dependencies by providing engineered proteins in solutions optimized for their activity and stability.

[0533] Compositions and systems described herein may comprise an engineered effector protein in a solution comprising a room temperature viscosity of less than about 15 centipoise, less than about 12 centipoise, less than about 10 centipoise, less than about 8 centipoise, less than about 6 centipoise, less than about 5 centipoise, less than about 4 centipoise, less than about 3 centipoise, less than about 2 centipoise, or less than about 1.5 centipoise.

[0534] Compositions and systems may comprise an engineered effector protein in a solution comprising an ionic strength of less than about 500 mM, less than about 400 mM, less than about 300 mM, less than about 250 mM, less than about 200 mM, less than about 150 mM, less than about 100 mM, less than about 80 mM, less than about 60 mM, or less than about 50 mM. Compositions and systems may comprise an engineered effector protein and an assay excipient, which may stabilize a reagent or product, prevent aggregation or precipitation, or enhance or stabilize a detectable signal (e.g., a fluorescent signal). Examples of assay excipients include, but are not limited to, saccharides and saccharide derivatives (e.g., sodium carboxymethyl cellulose and cellulose acetate), detergents, glycols, polyols, esters, buffering agents, alginic acid, and organic solvents (e.g., DMSO).

[0535] An engineered protein may comprise a modified form of a wild type counterpart protein (e.g., a D2S effector protein). The modified form of the wild type counterpart may comprise an amino acid change (e.g., deletion, insertion, or substitution) that reduces the nucleic acid-cleaving activity of the effector protein relative to the wild type counterpart. For example, a nuclease domain (e.g., RuvC domain) of a D2S effector protein may be deleted or mutated relative to a wild type counterpart D2S effector protein so that it is no longer functional or comprises reduced nuclease activity. The modified form of the effector protein may have less than 90%, less than 80%, less than 70%, less than 60%, less than 50%, less than 40%, less than 30%, less than 20%, less than 10%, less than 5%, or less than 1% of the nucleic acid-cleaving activity of the wild-type counterpart. Engineered proteins may have no substantial nucleic acid-cleaving activity. Engineered proteins may be enzymatically inactive or “dead,” that is it may bind to a nucleic acid but not cleave it. An enzymatically inactive protein may comprise an enzymatically inactive domain (e.g. inactive nuclease domain). Enzymatically inactive may refer to an activity less than 1%, less than 2%, less than 3%, less than 4%, less than 5%, less than 6%, less than 7%, less than 8%, less than 9%, or less than 10% activity compared to the wild-type counterpart. A dead protein may associate with a guide nucleic acid to activate or repress transcription of a target nucleic acid sequence. In some instances, the enzymatically inactive protein is fused with a protein comprising recombinase activity.

### Fusion Proteins

[0536] In some instances, an effector protein is a fusion protein, wherein the fusion protein comprises a D2S effector protein and a fusion partner protein. In some instances, the D2S effector protein comprises an amino acid sequence that is at least 70%, at least 75%, at least 80%, at least 85%, at least 90%, at least 95%, or 100% identical to any one of SEQ ID NOs: 1-5. In some instances the amino acid of the D2S effector protein is at least 70%, at least 75%, at least 80%, at least 85%, at least 90%, at least 95%, or 100% identical to any one of SEQ ID NOs: 1-45. In some instances the amino acid of the D2S effector protein is at least 70%, at least 75%, at least 80%, at least 85%, at least 90%, at least 95%, or 100% identical to any one of SEQ ID NOs: 1-45, 202-293, or 728-731. In some instances the amino acid of the D2S effector protein is at least 70%, at least 75%, at least 80%, at least 85%, at least 90%, at least 95%, at least 99%, or 100% identical to any one of SEQ ID NOs: 728-731. Unless otherwise indicated, reference to effector proteins throughout the present disclosure include fusion proteins thereof.

[0537] In some embodiments, a fusion effector protein, fusion protein, and fusion polypeptide, comprise a protein comprising at least two heterologous polypeptides. Often a fusion effector protein comprises an effector protein and a fusion partner protein. In general, the fusion partner protein is not an effector protein.

[0538] In some embodiments, a fusion partner protein or a fusion partner comprise a protein, polypeptide or peptide that is fused to an effector protein. The fusion partner generally imparts some function to the fusion protein that is not provided by the effector protein. The fusion partner may provide a detectable signal. The fusion partner may modify a target nucleic acid, including changing a nucleobase of the target nucleic acid and making a chemical modification to one or more nucleotides of the target nucleic acid. The fusion partner may be capable of modulating the expression of a target nucleic acid. The fusion partner may inhibit, reduce, activate or increase expression of a target nucleic acid via additional proteins or nucleic acid modifications to the target sequence.

[0539] A fusion partner protein is also simply referred to herein as a fusion partner. In some instances, the fusion partner promotes the formation of a multimeric complex of the D2S effector protein. In some instances, the fusion partner inhibits the formation of a multimeric complex of the D2S effector protein. By way of non-limiting example, the fusion protein may comprise a D2S effector protein- and a fusion partner comprising a Calcineurin A tag, wherein the fusion protein dimerizes in the presence of Tacrolimus (FK506). Also by way of non-limiting example, the fusion protein may comprise a D2S effector protein and a SpyTag configured to dimerize or associate with another effector protein in a multimeric complex.

[0540] In some instances, the fusion partner is fused to the N-terminus of the effector protein. In some instances, the fusion partner is fused to the C-terminus of the effector protein. The terms “fused” and “linked” are interchangeable.

[0541] In some instances, more than one fusion partner is fused to the effector protein. In some instances, a further fusion partner is fused to a first fusion partner that is fused to the effector protein.

[0542] In some instances, the fusion partner modulates transcription (e.g., inhibits transcription, increases transcription) of a target nucleic acid. In some instances, the fusion partner is a protein (or a domain from a protein) that inhibits transcription, also referred to as a transcriptional repressor. Transcriptional repressors may inhibit transcription via recruitment of transcription inhibitor proteins, modification of target DNA such as methylation, recruitment of a DNA modifier, modulation of histones associated with target DNA, recruitment of a histone modifier such as those that modify acetylation and/or methylation of histones, or a combination thereof. In some instances, the fusion partner is a protein (or a domain from a protein) that increases transcription, also referred to as a transcription activator. Transcriptional activators may promote transcription via recruitment of transcription activator proteins, modification of target DNA such as demethylation, recruitment of a DNA modifier, modulation of histones associated with target DNA, recruitment of a histone modifier such as those that modify acetylation and/or methylation of histones, or a combination thereof. In some instances, the fusion partner is a reverse transcriptase.

[0543] In some instances, the fusion partner is a base editor. In general, a base editor comprises a deaminase that when fused with a D2S protein changes a nucleobase to a different nucleobase, e.g., cytosine to thymine or guanine to adenine. In some instances, the base editor comprises a deaminase.

[0544] In some instances, fusion partners provide enzymatic activity that modifies a target nucleic acid. Such enzymatic activities include, but are not limited to, nuclease activity, methyltransferase activity, demethylase activity, DNA repair activity, DNA damage activity, deamination activity, dismutase activity, alkylation activity, depurination activity, oxidation activity, pyrimidine dimer forming activity, integrase activity, transposase activity, recombinase activity, polymerase activity, ligase activity, helicase activity, photolyase activity, and glycosylase activity.

### Modifying Target Nucleic Acids

[0545] In some instances, fusion partners have enzymatic activity that modifies the target nucleic acid. The target nucleic acid may comprise or consist of a ssRNA, dsRNA, ssDNA, or a dsDNA. Examples of enzymatic activity that modifies the target nucleic acid include, but are not limited to: nuclease activity such as that provided by a restriction enzyme (e.g., FokI nuclease); methyltransferase activity such as that provided by a methyltransferase (e.g., HhaI DNA m5c-methyltransferase (M.HhaI), DNA methyltransferase 1 (DNMT1), DNA methyltransferase 3a (DNMT3a), DNA methyltransferase 3b (DNMT3b), METI, DRM3 (plants), ZMET2, CMT1, CMT2 (plants)); demethylase activity such as that provided by a demethylase (e.g., Ten-Eleven Translocation (TET) dioxygenase 1 (TET1CD), TET1, DME, DML1, DML2, ROS1); DNA repair activity; DNA damage (e.g., oxygenation) activity; deamination activity such as that provided by a deaminase (e.g., a cytosine deaminase enzyme such as rat APOBEC1); dismutase activity; alkylation activity; depurination activity; oxidation activity; pyrimidine dimer forming activity; integrase activity such as that provided by an integrase and/or resolvase (e.g., Gin invertase such as the hyperactive mutant of the Gin invertase, GinH106Y; human immunodeficiency virus type 1 integrase (IN); Tn3 resolvase); transposase activity, recombinase activity such as that provided by a recombinase (e.g., catalytic domain of Gin recombinase); as well as polymerase activity, ligase activity, helicase activity, photolyase activity, and glycosylase activity.

[0546] Non-limiting examples of fusion partners for targeting ssRNA include, but are not limited to, splicing factors (e.g., RS domains); protein translation components (e.g., translation initiation, elongation, and/or release factors; e.g., eIF4G); RNA methylases; RNA editing enzymes (e.g., RNA deaminases, e.g., adenosine deaminase acting on RNA (ADAR), including A to I and/or C to U editing enzymes); helicases; and RNA-binding proteins. It is understood that a fusion protein may include the entire protein or in some instances may include a fragment of the protein (e.g., a functional domain). In some instances, the functional domain interacts with or binds ssRNA, including intramolecular and/or intermolecular secondary structures thereof, e.g., hairpins, stem-loops, etc.). In some embodiments, a functional domain comprises a region of one or more amino acids in a protein that is required for an activity of the protein, or the full extent of that activity, as measured in an in vitro assay. Activities include, but are not limited to nucleic acid binding, nucleic acid modification, nucleic acid cleavage, protein binding. The absence of the functional domain, including mutations of the functional domain, would abolish or reduce activity. The functional domain may interact transiently or irreversibly, directly or indirectly. Fusion proteins may comprise a protein or domain thereof selected from: endonucleases (e.g., RNase III, the CRR22 DYW domain, Dicer, and PIN (PilT N-terminus); SMG5 and SMG6; domains responsible for stimulating RNA cleavage (e.g., CPSF, CstF, CFIm and CFIIm); exonucleases such as XRN-1 or Exonuclease T; deadenylases such as HNT3; protein domains responsible for nonsense mediated RNA decay (e.g., UPF1, UPF2, UPF3, UPF3b, RNP 51, Y14, DEK, REF2, and SRm160); protein domains responsible for stabilizing RNA (e.g., PABP); proteins and protein domains responsible for repressing translation (e.g., Ago2 and Ago4); proteins and protein domains responsible for stimulating translation (e.g., Staufen); proteins and protein domains responsible for (e.g., capable of) modulating translation (e.g., translation factors such as initiation factors, elongation factors, release factors, etc., e.g., eIF4G); proteins and protein domains responsible for polyadenylation of RNA (e.g., PAP1, GLD-2, and Star-PAP); proteins and protein domains responsible for polyuridinylation of RNA (e.g., CI D1 and terminal uridylate transferase); proteins and protein domains responsible for RNA localization (e.g., from IMP1, ZBP1, She2p, She3p, and Bicaudal-D); proteins and protein domains responsible for nuclear retention of RNA (e.g., Rrp6); proteins and protein domains responsible for nuclear export of RNA (e.g., TAP, NXF1, THO, TREX, REF, and Aly); proteins and protein domains responsible for repression of RNA splicing (e.g., PTB, Sam68, and hnRNP A1); proteins and protein domains responsible for stimulation of RNA splicing (e.g., Serine/Arginine-rich (SR) domains); proteins and protein domains responsible for reducing the efficiency of transcription (e.g., FUS (TLS)); and proteins and protein domains responsible for stimulating transcription (e.g., CDK7 and HIV Tat). Alternatively, the effector domain may be a domain of a protein selected from the group comprising endonucleases; proteins and protein domains capable of stimulating RNA cleavage; exonucleases; deadenylases; proteins and protein domains having nonsense mediated RNA decay activity; proteins and protein domains capable of stabilizing RNA; proteins and protein domains capable of repressing translation; proteins and protein domains capable of stimulating translation; proteins and protein domains capable of modulating translation (e.g., translation factors such as initiation factors, elongation factors, release factors, etc., e.g., eIF4G); proteins and protein domains capable of polyadenylation of RNA; proteins and protein domains capable of polyuridinylation of RNA; proteins and protein domains having RNA localization activity; proteins and protein domains capable of nuclear retention of RNA; proteins and protein domains having RNA nuclear export activity; proteins and protein domains capable of repression of RNA splicing; proteins and protein domains capable of stimulation of RNA splicing; proteins and protein domains capable of reducing the efficiency of transcription; and proteins and protein domains capable of stimulating transcription. Another suitable fusion partner is a PUF RNA-binding domain, which is described in more detail in WO2012068627, which is hereby incorporated by reference in its entirety.

[0547] In some instances, the fusion partner comprises an RNA splicing factor. The RNA splicing factor may be used (in whole or as fragments thereof) for modular organization, with separate sequence-specific RNA binding modules and splicing effector domains. Non-limiting examples of RNA splicing factors include members of the Serine/Arginine-rich (SR) protein family contain N-terminal RNA recognition motifs (RRMs) that bind to exonic splicing enhancers (ESEs) in pre-mRNAs and C-terminal RS domains that promote exon inclusion. As another example, the hnRNP protein hnRNP A1 binds to exonic splicing silencers (ESSs) through its RRM domains and inhibits exon inclusion through a C-terminal Glycine-rich domain. Some splicing factors may regulate alternative use of splice site (ss) by binding to regulatory sequences between the two alternative sites. For example, ASF/SF2 may recognize ESEs and promote the use of intron proximal sites, whereas hnRNP A1 may bind to ESSs and shift splicing towards the use of intron distal sites. One application for such factors is to generate ESFs that modulate alternative splicing of endogenous genes, particularly disease associated genes. For example, Bcl-x pre-mRNA produces two splicing isoforms with two alternative 5′ splice sites to encode proteins of opposite functions. The long splicing isoform Bcl-xL is a potent apoptosis inhibitor expressed in long-lived postmitotic cells and is up-regulated in many cancer cells, protecting cells against apoptotic signals. The short isoform Bcl-xS is a pro-apoptotic isoform and expressed at high levels in cells with a high turnover rate (e.g., developing lymphocytes). The ratio of the two Bcl-x splicing isoforms is regulated by multiple c\acute{ω}-elements that are located in either the core exon region or the exon extension region (i.e., between the two alternative 5′ splice sites). For more examples, see WO2010075303, which is hereby incorporated by reference in its entirety.

[0548] In some instances, fusion proteins are targeted by a guide nucleic acid (guide RNA) to a specific location in the target nucleic acid and exert locus-specific regulation such as blocking RNA polymerase binding to a promoter (which selectively inhibits transcription activator function), and/or modifying the local chromatin status (e.g., when a fusion sequence is used that modifies the target nucleic acid or modifies a protein associated with the target nucleic acid). In some instances, the modifications are transient (e.g., transcription repression or activation). In some instances, the modifications are inheritable. For instance, epigenetic modifications made to a target nucleic acid, or to proteins associated with the target nucleic acid, e.g., nucleosomal histones, in a cell, are observed in cells produced by proliferation of the cell.

### CRISPRa Fusions and CRISPRi Fusions

[0549] In some instances, fusion partners include, but are not limited to, a protein that directly and/or indirectly provides for increased or decreased transcription and/or translation of a target nucleic acid (e.g., a transcription activator or a fragment thereof, a protein or fragment thereof that recruits a transcription activator, a small molecule/drug-responsive transcription and/or translation regulator, a translation-regulating protein, etc.). In some instances, fusion partners that increase or decrease transcription include a transcription activator domain or a transcription repressor domain, respectively.

[0550] In some embodiments, fusion partners activate or increase expression of a target nucleic acid. Fusion proteins comprising such fusion partners and a Cas effector protein may be referred to as CRISPRa fusions. In some embodiments, fusion partners increase expression of the target nucleic acid relative to its expression in the absence of the fusion protein. Relative expression, including transcription and RNA levels, may be assessed, quantified, and compared, e.g., by RT-qPCR. In some embodiments, fusion partners comprise a transcriptional activator. Transcriptional activators may promote transcription via: recruitment of other transcription factor proteins; modification of target DNA such as demethylation; recruitment of a DNA modifier; modulation of histones associated with target DNA; recruitment of a histone modifier such as those that modify acetylation and/or methylation of histones; or a combination thereof.

[0551] In some cases, a fusion partner that promotes or increases transcription is VPR. In some embodiments, VPR can be fused to a catalytically inactive effector protein. In some embodiments, the amino acid sequence of VPR is DALDDFDLDMLGSDALDDFDLDMLGSDALDDFDLDMLGSDALDDFDLDMLINSRSSGSPKK KRKVGSQYLPDTDDRHRIEEKRKRTYETFKSIMKKSPFSGPTDPRPPPRRIAVPSRSSASVPKP APQPYPFTSSLSTINYDEFPTMVFPSGQISQASALAPAPPQVLPQAPAPAPAPAMVSALAQAPA PVPVLAPGPPQAVAPPAPKPTQAGEGTLSEALLQLQFDDEDLGALLGNSTDPAVFTDLASVD NSEFQQLLNQGIPVAPHTTEPMLMEYPEAITRLVTGAQRPPDPAPAPLGAPGLPNGLLSGDED FSSIADMDFSALLGSGSGSRDSREGMFLPKPEAGSAISDVFEGREVCQPKRIRPFHPPGSPWAN RPLPASLAPTPTGPVHEPVGSLTPAPVPQPLDPAPAVTPEASHLLEDPDEETSQAVKALREMA DTVIPQKEEAAICGQMDLSHPPPRGHLDELTTTLESMTEDLNLDSPLTPELNEILDTFLNDECL LHAMHISTGLSIFDTSLF (SEQ ID NO: 300). In some embodiments, a fusion partner protein comprises an amino acid sequence that is at least 75%, at least 80%, at least 85%, at least 90%, at least 95%, at least 98%, at least 99% or 100% identical to SEQ ID NO: 300.

[0552] Non-limiting examples of fusion partners that promote or increase transcription include, but are not limited to: transcriptional activators such as VP16, VP64, VP48, VP160, p65 subdomain (e.g., from NFkB), and activation domain of EDLL and/or TAL activation domain (e.g., for activity in plants); histone lysine methyltransferases such as SET1A, SET1B, MLL1 to 5, ASH1, SYMD2, NSD1; histone lysine demethylases such as JHDM2a/b, UTX, JMJD3; histone acetyltransferases such as GCN5, PCAF, CBP, p300, TAF1, TIP60/PLIP, MOZ/MYST3, MORF/MYST4, SRC1, ACTR, P160, CLOCK; and DNA demethylases such as Ten-Eleven Translocation (TET) dioxygenase 1 (TET1CD), TET1, DME, DML1, DML2, and ROS1; and functional domains thereof.

[0553] In some embodiments, a target nucleic acid for increased expression comprises NEUROD1, HBG1, ASCL1, LIN28A, or any combination thereof. In some cases, to increase the expression of target, a guide RNA comprises a sequence that is at least 75%, at least 80%, at least 85%, at least 90%, at least 95%, at least 98%, at least 99% or 100% identical to any one of SEQ ID NOs: 647-710.

[0554] In some embodiments, fusions partners inhibit or reduce expression of a target nucleic acid. Fusion proteins comprising such fusion partners and an effector protein may be referred to as CRISPRi fusions. In some embodiments, fusion partners reduce expression of the target nucleic acid relative to its expression in the absence of the fusion effector protein. Relative expression, including transcription and RNA levels, may be assessed, quantified, and compared, e.g., by RT-qPCR. In some embodiments, fusion partners may comprise a transcriptional repressor. In some embodiments, a transcriptional repressor can describe a polypeptide or a fragment thereof that is capable of arresting, preventing, or reducing transcription of a target nucleic acid. Transcriptional repressors may inhibit transcription via: recruitment of other transcription factor proteins; modification of target DNA such as methylation; recruitment of a DNA modifier; modulation of histones associated with target DNA; recruitment of a histone modifier such as those that modify acetylation and/or methylation of histones; or a combination thereof.

[0555] Non-limiting examples of fusion partners that decrease or inhibit transcription include, but are not limited to: transcriptional repressors such as the Krüppel associated box (KRAB or SKD); KOX1 repression domain; the Mad mSIN3 interaction domain (SID); the ERF repressor domain (ERD), the SRDX repression domain (e.g., for repression in plants); histone lysine methyltransferases such as Pr-SET7/8, SUV4-20H1, RIZ1, and the like; histone lysine demethylases such as JMJD2A/JHDM3A, JMJD2B, JMJD2C/GASC1, JMJD2D, JARID1A/RBP2, JARID1B/PLU-1, JARID1C/SMCX, JARID1D/SMCY; histone lysine deacetylases such as HDAC1, HDAC2, HDAC3, HDAC8, HDAC4, HDAC5, HDAC7, HDAC9, SIRT1, SIRT2, HDAC11; DNA methylases such as HhaI DNA m5c-methyltransferase (M.HhaI), DNA methyltransferase 1 (DNMT1), DNA methyltransferase 3a (DNMT3a), DNA methyltransferase 3b (DNMT3b), METI, DRM3 (plants), ZMET2, CMT1, CMT2 (plants); and periphery recruitment elements such as Lamin A, and Lamin B; and functional domains thereof.

[0556] In some instances, fusion partners include, but are not limited to, a protein that directly and/or indirectly provides for increased or decreased transcription and/or translation of a target nucleic acid (e.g., a transcription activator or a fragment thereof, a protein or fragment thereof that recruits a transcription activator, a small molecule/drug-responsive transcription and/or translation regulator, a translation-regulating protein, etc.). In some instances, fusion partners that increase or decrease transcription include a transcription activator domain or a transcription repressor domain, respectively.

### Base Editors

[0557] In some embodiments, fusion partners modify a nucleobase of a target nucleic acid. Fusion proteins comprising such fusion partners and an effector protein may be referred to as base editors. When a base editor is described herein, it can refer to a fusion protein comprising a base editing enzyme fused to an effector protein. The base editor is functional when the effector protein is coupled to a guide nucleic acid. The guide nucleic acid imparts sequence specific activity to the base editor. By way of non-limiting example, the effector protein may comprise a catalytically inactive effector protein. Also, by way of non-limiting example, the base editing enzyme may comprise deaminase activity. Additional base editors are described herein.

[0558] In some embodiments, fusion partners modify a nucleobase of a target nucleic acid. Fusion proteins comprising such fusion partners and a Cas effector protein may be referred to as base editors. In some embodiments, base editors modify a sequence of a target nucleic acid. In some embodiments, base editors provide a nucleobase change in a DNA molecule. In some embodiments, the nucleobase change in the DNA molecule is selected from: an adenine (A) to guanine (G); cytosine (C) to thymine (T); and cytosine (C) to guanine (G). In some embodiments, base editors provide a nucleobase change in an RNA molecule. In some embodiments, the nucleobase change in the RNA molecule is selected from: adenine (A) to guanine (G); uracil (U) to cytosine (C); cytosine (C) to guanine (G); and guanine (G) to adenine (A). In some embodiments, the fusion partner is a deaminase, e.g., ADAR1/2.

[0559] In some embodiments, a base editor comprises a fusion protein comprising a base editing enzyme fused to an effector protein. The base editor is functional when the effector protein is coupled to a guide nucleic acid. The guide nucleic acid imparts sequence specific activity to the base editor. By way of non-limiting example, the effector protein may comprise a catalytically inactive effector protein. Also, by way of non-limiting example, the base editing enzyme may comprise deaminase activity.

[0560] Some base editors modify a nucleobase of on a single strand of DNA. In some embodiments, base editors modify a nucleobase on both strands of dsDNA. In some embodiments, upon binding to its target locus in DNA, base pairing between the guide RNA and target DNA strand leads to displacement of a small segment of single-stranded DNA in an “R-loop”. In some embodiments, DNA bases within the R-loop are modified by the deaminase enzyme. In some embodiments, DNA base editors for improved efficiency in eukaryotic cells comprise a catalytically inactive effector protein that may generate a nick in the non-edited DNA strand, inducing repair of the non-edited strand using the edited strand as a template.

[0561] Some base editors modify a nucleobase of an RNA. In some embodiments, RNA base editors comprise an adenosine deaminase. In some embodiments, ADAR proteins bind to RNAs and alter their sequence by changing an adenosine into an inosine. In some embodiments, RNA base editors comprise a Cas effector protein that is activated by or binds RNA. Non-limiting examples of Cas effector proteins that are activated by or bind RNA are Cas13 proteins.

[0562] In some embodiments, base editors are used to treat a subject having or a subject suspected of having a disease related to a gene of interest. In some embodiments, base editors are useful for treating a disease or a disorder caused by a point mutation in a gene of interest. In some embodiments, compositions comprise a base editor and a guide nucleic acid, wherein the guide nucleic acid directs the base editor to a sequence in a target gene. The target gene may be associated with a disease. In some embodiments, the guide nucleic acid directs that base editor to or near a mutation in the sequence of a target gene. The mutation may be the deletion of one more nucleotides. The mutation may be the addition of one or more nucleotides. The mutation may be the substitution of one or more nucleotides. The mutation may be the insertion, deletion or substitution of a single nucleotide, also referred to as a point mutation. The point mutation may be a SNP. The mutation may be associated with a disease. In some embodiments, the guide nucleic acid directs the base editor to bind a target sequence within the target nucleic acid that is within 0, 1, 2, 3, 4, 5, 6, 7, 8, 9, 10, 11, 12, 13, 14, 15, 16, 17, 18, 19, or 20 nucleotides of the mutation. In some embodiments, the guide nucleic acid comprises a sequence that is identical, complementary or reverse complementary to a target sequence of a target nucleic acid that comprises the mutation. In some embodiments, the guide nucleic acid comprises a sequence that is identical, complementary or reverse complementary to a target sequence of a target nucleic acid that is within 1, 2, 3, 4, 5, 6, 7, 8, 9, 10, 11, 12, 13, 14, 15, 16, 17, 18, 19, or 20 nucleotides of the mutation.

[0563] Some base editors modify a nucleobase of an RNA. In some embodiments, RNA base editors comprise an adenosine deaminase. In some embodiments, ADAR proteins bind to RNAs and alter their sequence by changing an adenosine into an inosine. In some embodiments, RNA base editors comprise a Cas effector protein that is activated by or binds RNA. Non-limiting examples of Cas effector proteins that are activated by or bind RNA are Cas13 proteins.

[0564] In some embodiments, base editors are used to treat a subject having or a subject suspected of having a disease related to a gene of interest. In some embodiments, base editors are useful for treating a disease or a disorder caused by a point mutation in a gene of interest. In some embodiments, compositions comprise a base editor and a guide nucleic acid, wherein the guide nucleic acid directs the base editor to a sequence in a target gene

[0565] In some embodiments, fusion partners comprise a base editing enzyme. In some embodiments, the base editing enzyme modifies the nucleobase of a deoxyribonucleotide. In some embodiments, the base editing enzyme modifies the nucleobase of a ribonucleotide. A base editing enzyme that converts a cytosine to a guanine or thymine may be referred to as a cytosine base editing enzyme. A base editing enzyme that converts an adenine to a to a guanine may be referred to as an adenine base editing enzyme. In some embodiments, the base editing enzyme comprises a deaminase enzyme. In some embodiments, the deaminase functions as a monomer. In some embodiments, the deaminase functions as heterodimer with an additional protein. In some embodiments, base editors comprise a DNA glycosylase inhibitor. In some embodiments, base editors comprise a uracil glycosylase inhibitor (UGI) or uracil N-glycosylase (UNG). In some embodiments, base editors do not comprise a UGI. In some embodiments, base editors do not comprise a UNG. In some embodiments, base editors do not comprise a functional fragment of a UGI. A functional fragment of a UGI is a fragment of a UGI that is capable of excising a uracil residue from DNA by cleaving an N-glycosydic bond. In some embodiments, a functional fragment, comprises a fragment of a protein that retains some function relative to the entire protein.

[0566] In some embodiments, a base editing enzyme comprises a protein, polypeptide or fragment thereof that is capable of catalyzing the chemical modification of a nucleobase of a deoxyribonucleotide or a ribonucleotide. Such a base editing enzyme, for example, is capable of catalyzing a reaction that modifies a nucleobase that is present in a nucleic acid molecule, such as DNA or RNA (single stranded or double stranded). Non-limiting examples of the type of modification that a base editing enzyme is capable of catalyzing includes converting an existing nucleobase to a different nucleobase, such as converting a cytosine to a guanine or thymine or converting an adenine to a guanine, hydrolytic deamination of an adenine or adenosine, or methylation of cytosine (e.g., CpG, CpA, CpT or CpC). A base editing enzyme itself may or may not bind to the nucleic acid molecule containing the nucleobase.

[0567] In some embodiments, the base editor is a cytidine deaminase base editor generated by ancestral sequence reconstruction as described in WO2019226953, which is hereby incorporated by reference in its entirety.

[0568] Exemplary deaminase domains are described WO 2018027078 and WO2017070632, and each are hereby incorporated in its entirety by reference. Also, additional exemplary deaminase domains are described in Komor et al., Nature, 533, 420-424 (2016); Gaudelli et al., Nature, 551, 464-471 (2017); Komor et al., Science Advances, 3:eaao4774 (2017), and Rees et al., Nat Rev Genet. 2018 December; 19(12):770-788. doi: 10.1038/s41576-018-0059-1, which are hereby incorporated by reference in their entirety.

[0569] In some embodiments, the base editor is a cytosine base editor (CBE). In general, a CBE comprises a cytosine base editing enzyme and a catalytically inactive effector protein. In some embodiments, the catalytically inactive effector protein is a catalytically inactive variant of a Cas effector protein described herein. The CBE may convert a cytosine to a thymine. In some embodiments, the base editor is an adenine base editor (ABE). In general, an ABE comprises an adenine base editing enzyme and a catalytically inactive effector protein. In some embodiments, the catalytically inactive effector protein is a catalytically inactive variant of a Cas effector protein described herein. The ABE generally converts an adenine to a guanine. In some embodiments, the base editor is a cytosine to guanine base editor (CGBE). In general, a CGBE converts a cytosine to a guanine.

[0570] In some embodiments, the base editor is a CBE. In some embodiments, the cytosine base editing enzyme is a cytosine deaminase. In some embodiments, the cytosine deaminase is an APOBEC1 cytosine deaminase, which accept ssDNA as a substrate but is incapable of cleaving dsDNA, fused to a catalytically inactive effector protein. In some embodiments, when bound to its cognate DNA, the catalytically inactive effector protein performs local denaturation of the DNA duplex to generate an R-loop in which the DNA strand not paired with the guide RNA exists as a disordered single-stranded bubble. In some embodiments, the catalytically inactive effector protein generated ssDNA R-loop enables the CBE to perform efficient and localized cytosine deamination in vitro. In some examples, deamination activity is exhibited in a window of about 4 to about 10 base pairs. In some embodiments, fusion to the catalytically inactive effector protein presents the target site to APOBEC1 in high effective molarity, enabling the CBE to deaminate cytosines located in a variety of different sequence motifs, with differing efficacies. In some embodiments, the CBE is capable of mediating RNA-programmed deamination of target cytosines in vitro. In some embodiments, the CBE is capable of mediating RNA-programmed deamination of target cytosines in vivo. In some embodiments, the cytosine base editing enzyme is a cytosine base editing enzyme described by Koblan et al. (2018) Nature Biotechnology 36:848-846; Komor et al. (2016) Nature 533:420-424; Koblan et al. (2021) “Efficient CG-to-GC base editors developed using CRISPRi screens, target-library analysis, and machine learning,” Nature Biotechnology; Kurt et al. (2021) Nature Biotechnology 39:41-46; Zhao et al. (2021) Nature Biotechnology 39:35-40; and Chen et al. (2021) Nature Communications 12:1384, all incorporated herein by reference.

[0571] In some embodiments, CBEs comprise a uracil glycosylase inhibitor (UGI) or uracil N-glycosylase (UNG). In some embodiments, base excision repair (BER) of U⋅G in DNA is initiated by a UNG, which recognizes the U⋅G mismatch and cleaves the glyosidic bond between uracil and the deoxyribose backbone of DNA. In some embodiments, BER results in the reversion of the U⋅G intermediate created by the first CBE back to a C⋅G base pair. In some embodiments, UNG may be inhibited by fusion of uracil DNA glycosylase inhibitor (UGI), in some embodiments, a small protein from bacteriophage PBS, to the C-terminus of the CBE. In some embodiments, UGI is a DNA mimic that potently inhibits both human and bacterial UNG. In some embodiments, a UGI inhibitor is any protein or polypeptide that inhibits UNG. In some embodiments, the CBE mediates efficient base editing in bacterial cells and moderately efficient editing in mammalian cells, enabling conversion of a C⋅G base pair to a T⋅A base pair through a U⋅G intermediate. In some embodiments, the CBE is modified to increase base editing efficiency while editing more than one strand of DNA.

[0572] In some embodiments, the CBE nicks the non-edited DNA strand. In some embodiments, the non-edited DNA strand nicked by the CBE biases cellular repair of the U⋅G mismatch to favor a UA outcome, elevating base editing efficiency. In some embodiments, the APOBEC1-nickase-UGI fusion efficiently edits in mammalian cells, while minimizing frequency of non-target indels.

[0573] In some embodiments, the cytidine deaminase is selected from APOBEC1, APOBEC2, APOBEC3C, APOBEC3D, APOBEC3F, APOBEC3G, APOBEC3H, APOBEC4, APOBEC3A, BE1 (APOBEC1-XTEN-dCas9), BE2 (APOBEC1-XTEN-dCas9-UGI), BE3 (APOBEC1-XTEN-dCas9(A840H)-UGI), BE3-Gam, saBE3, saBE4-Gam, BE4, BE4-Gam, saBE4, or saBE4-Gam as described in WO2021163587, WO202108746, WO2021062227, and WO2020123887, which are incorporated herein by reference in their entirety.

[0574] In some embodiments, the fusion protein further comprises a non-protein uracil-DNA glcosylase inhibitor (npUGI). In some embodiments, the npUGI is selected from a group of small molecule inhibitors of uracil-DNA glycosylase (UDG), or a nucleic acid inhibitor of UDG. In some embodiments, the non-protein uracil-DNA glcosylase inhibitor (npUGI) is a small molecule derived from uracil. Examples of small molecule non-protein uracil-DNA glcosylase inhibitors, fusion proteins, and Cas-CRISPR systems comprising base editing activity are described in WO202108746, which is incorporated by reference in its entirety.

[0575] In some embodiments, the fusion partner is a deaminase, e.g., ADAR1/2, ADAR-2, or AID. In some embodiments, the base editor is an ABE. In some embodiments, the adenine base editing enzyme of the ABE is an adenosine deaminase. In some embodiments, the adenine base editing enzyme is selected from ABE8e, ABE8.20m, APOBEC3A, Anc APOBEC, and BtAPOBEC2. In some embodiments, the ABE base editor is an ABET base editor. In some embodiments, the deaminase or enzyme with deaminase activity is selected from ABE8.1m, ABE8.2m, ABE8.3m, ABE8.4m, ABE8.5m, ABE8.6m, ABE8.7m, ABE8.8m, ABE8.9m, ABE8.10m, ABE8.11m, ABE8.12m, ABE8.13m, ABE8.14m, ABE8.15m, ABE8.16m, ABE8.17m, ABE8.18m, ABE8.19m, ABE8.20m, ABE8.21m, ABE8.22m, ABE8.23m, ABE8.24m, ABE8.1d, ABE8.2d, ABE8.3d, ABE8.4d, ABE8.5d, ABE8.6d, ABE8.7d, ABE8.8d, ABE8.9d, ABE8.10d, ABE8.11d, ABE8.12d, ABE8.13d, ABE8.14d, ABE8.15d, ABE8.16d, ABE8.17d, ABE8.18d, ABE8.19d, ABE8.20d, ABE8.21d, ABE8.22d, ABE8.23d, or ABE8.24d. In some embodiments, the adenine base editing enzyme is ABE8.1d. In some embodiments, the adenosine base editor is ABE9. Exemplary deaminases are described in US20210198330, WO2021041945, WO2021050571A1, and WO2020123887, all of which are incorporated herein by reference in their entirety. Sequences of a selection of these enzymes are provided in TABLE 2. In some embodiments, the adenine base editing enzyme is an adenine base editing enzyme described in Chu et al., (2021) The CRISPR Journal 4:2:169-177, incorporated herein by reference. In some embodiments, the adenine deaminase is an adenine deaminase described by Koblan et al. (2018) Nature Biotechnology 36:848-846, incorporated herein by reference. In some embodiments, the adenine base editing enzyme is an adenine base editing enzyme described by Tran et al. (2020) Nature Communications 11:4871. Additional examples of deaminase domains are also described in WO2018027078 and WO2017070632, which are hereby incorporated by reference in their entirety.

[0576] In some embodiments, an ABE converts an A⋅T base pair to a GC base pair. In some embodiments, the ABE converts a target A⋅T base pair to GC in vivo. In some embodiments, the ABE converts a target A⋅T base pair to GC in vitro. In some embodiments, ABEs provided herein reverse spontaneous cytosine deamination, which has been linked to pathogenic point mutations. In some embodiments, ABEs provided herein enable correction of pathogenic SNPs (˜47% of disease-associated point mutations). In some embodiments, the adenine comprises exocyclic amine that has been deaminated (e.g., resulting in altering its base pairing preferences). In some embodiments, deamination of adenosine yields inosine. In some embodiments, inosine exhibits the base-pairing preference of guanine in the context of a polymerase active site, although inosine in the third position of a tRNA anticodon is capable of pairing with A, U, or C in mRNA during translation. In some embodiments, an ABE comprises an engineered adenosine deaminase enzyme capable of acting on ssDNA.

[0577] In some embodiments, a base editor comprises an adenosine deaminase variant that differs from a naturally occurring deaminase. Relative to the naturally occurring deaminase, the adenosine deaminase variant may comprise a V82S alteration, a T166R alteration, or a combination thereof. In some embodiments, the adenosine deaminase variant comprises at least one of the following alterations relative to a naturally occurring adenosine deaminase: Y147T, Y147R, Q154S, Y123H, and Q154R, which are incorporated herein by reference in their entirety.

[0578] In some embodiments, a base editor comprises a deaminase dimer. In some embodiments, a base editor is a deaminase dimer further comprising a base editing enzyme and an adenine deaminase (e.g., TadA).

[0579] In some embodiments, the adenosine deaminase is a TadA monomer (e.g., Tad*7.10, TadA*8 or TadA*9). In some embodiments, the adenosine deaminase is a TadA*8 variant. Such a TadA*8 variant includes TadA*8.1, TadA*8.2, TadA*8.3, TadA*8.4, TadA*8.5, TadA*8.6, TadA*8.7, TadA*8.8, TadA*8.9, TadA*8.10, TadA*8.11, TadA*8.12, TadA*8.13, TadA*8.14, TadA*8.15, TadA*8.16, TadA*8.17, TadA*8.18, TadA*8.19, TadA*8.20, TadA*8.21, TadA*8.22, TadA*8.23, or TadA*8.24 as described in WO2021163587 and WO2021050571, which are each hereby incorporated by reference in its entirety.

[0580] In some embodiments, a base editor is a deaminase dimer comprising a base editing enzyme fused to TadA via a linker. In some embodiments the linker comprises or consists of at least a portion of the sequence:

[0581] In some embodiments, the amino terminus of the fusion partner protein is linked to the carboxy terminus of the effector protein via the linker. In some embodiments, the carboxy terminus of the fusion partner protein is linked to the amino terminus of the effector protein via the linker.

[0582] In some embodiments, the base editing enzyme is fused to TadA at the N-terminus. In some embodiments, the base editing enzyme is fused to TadA at the C-terminus. In some embodiments, the base editing enzyme is a deaminase dimer comprising an ABE. In some embodiments, the deaminase dimer comprises an adenosine deaminase. In some embodiments, the deaminase dimer comprises TadA fused to an adenine base editing enzyme selected from ABE8e, ABE8.20m, APOBEC3A, Anc APOBEC, and BtAPOBEC2. In some embodiments TadA is fused to ABE8e or a variant thereof. In some embodiments TadA is fused to ABE8e or a variant thereof at the amino-terminus (ABE8e-TadA). In some embodiments, TadA is fused to ABE8e or a variant thereof at the carboxy terminus (ABE8e-TadA).

[0583] In some embodiments, the amino terminus of the fusion partner protein is linked to the carboxy terminus of the effector protein via the linker. In some embodiments, the carboxy terminus of the fusion partner protein is linked to the amino terminus of the effector protein via the linker. In some embodiments, a linker can comprise a XTEN10 linker (SEQ ID NO: 711), an XTEN40 linker (SEQ ID NO: 734) or an XTEN80 linker (SEQ ID NO: 735). In some embodiments, a linker can comprise an amino acid sequence that is at least 60%, at least 65%, at least 70%, at least 75%, at least 80%, at least 85%, at least 90%, at least 95%, at least 98%, at least 99% or 100% identical to SEQ ID NOs: 711, 734, or 735.

[0584] In some embodiments, fusion partners comprise an amino acid sequence that is at least 50%, at least 55%, at least 60%, at least 65%, at least 70%, at least 75%, at least 80%, at least 85%, at least 90%, at least 95%, at least 98%, at least 99% or 100% identical to ABE8e (SEQ ID NO: 713). In some embodiments, fusion partners comprise an amino acid sequence that is at least 50%, at least 55%, at least 60%, at least 65%, at least 70%, at least 75%, at least 80%, at least 85%, at least 90%, at least 95%, at least 98%, at least 99% or 100% identical to ABE8.20m (SEQ ID NO: 714). In some embodiments, fusion partners comprise an amino acid sequence that is at least 50%, at least 55%, at least 60%, at least 65%, at least 70%, at least 75%, at least 80%, at least 85%, at least 90%, at least 95%, at least 98%, at least 99% or 100% identical to APOBEC3 (SEQ ID NO: 732). In some embodiments, fusion partners comprise an amino acid sequence that is at least 50%, at least 55%, at least 60%, at least 65%, at least 70%, at least 75%, at least 80%, at least 85%, at least 90%, at least 95%, at least 98%, at least 99% or 100% identical to AncBE4Max (SEQ ID NO: 733).

### Modifying Proteins

[0585] In some instances, a fusion partner provides enzymatic activity that modifies a protein (e.g., a histone) associated with a target nucleic acid. Such enzymatic activities include, but are not limited to, methyltransferase activity, demethylase activity, acetyltransferase activity, deacetylase activity, kinase activity, phosphatase activity, ubiquitin ligase activity, deubiquitinating activity, adenylation activity, deadenylation activity, SUMOylating activity, deSUMOylating activity, ribosylation activity, de-ribosylation activity, myristoylation activity, and demyristoylation activity.

[0586] In some instances, the fusion partner has enzymatic activity that modifies a protein associated with a target nucleic acid. The protein may be a histone, an RNA binding protein, or a DNA binding protein. Examples of such protein modification activities include methyltransferase activity such as that provided by a histone methyltransferase (HMT) (e.g., suppressor of variegation 3-9 homolog 1 (SUV39H1, also known as KMT1A), euchromatic histone lysine methyltransferase 2 (G9A, also known as KMT1C and EHMT2), SUV39H2, ESET/SETDB1, SET1A, SET1B, MLL1 to 5, ASH1, SYMD2, NSD1, DOT1L, Pr-SET7/8, SUV4-20H1, EZH2, RIZ1); demethylase activity such as that provided by a histone demethylase (e.g., Lysine Demethylase 1A (KDM1A also known as LSD1), JHDM2a/b, JMJD2A/JHDM3A, JMJD2B, JMJD2C/GASC1, JMJD2D, JARID1A/RBP2, JARID1B/PLU-1, JARID1C/SMCX, JARID1D/SMCY, UTX, JMJD3); acetyltransferase activity such as that provided by a histone acetylase transferase (e.g., catalytic core/fragment of the human acetyltransferase p300, GCN5, PCAF, CBP, TAF1, TIP60/PLIP, MOZ/MYST3, MORF/MYST4, HBO1/MYST2, HMOF/MYST1, SRC1, ACTR, P160, CLOCK); deacetylase activity such as that provided by a histone deacetylase (e.g., HDAC1, HDAC2, HDAC3, HDAC8, HDAC4, HDAC5, HDAC7, HDAC9, SIRT1, SIRT2, HDAC11); kinase activity, phosphatase activity, ubiquitin ligase activity, deubiquitinating activity, adenylation activity, deadenylation activity, SUMOylating activity, deSUMOylating activity, ribosylation activity, deribosylation activity, myristoylation activity, and demyristoylation activity.

[0587] In some instances, the fusion partner is a chloroplast transit peptide (CTP), also referred to as a plastid transit peptide. In some instances, this targets the fusion protein to a chloroplast. Chromosomal transgenes from bacterial sources must have a sequence encoding a CTP sequence fused to a sequence encoding an expressed protein if the expressed protein is to be compartmentalized in the plant plastid (e.g. chloroplast). The CTP is removed in a processing step during translocation into the plastid. Accordingly, localization of an exogenous protein to a chloroplast is often accomplished by means of operably linking a polynucleotide sequence encoding a CTP sequence to the 5′ region of a polynucleotide encoding the exogenous protein. In some instances, the CTP is located at the N-terminus of the fusion protein. Processing efficiency may, however, be affected by the amino acid sequence of the CTP and nearby sequences at the amino terminus (NH2 terminus) of the peptide.

[0588] In some instances, the fusion partner is an endosomal escape peptide. In some instances, an endosomal escape protein comprises the amino acid sequence GLFXALLXLLXSLWXLLLXA (SEQ ID NO: 200), wherein each X is independently selected from lysine, histidine, and arginine. In some instances, an endosomal escape protein comprises the amino acid sequence GLFHALLHLLHSLWHLLLHA (SEQ ID NO: 201). In some instances, the amino acid sequence of the endosomal escape protein is SEQ ID NO: 200 or SEQ ID NO: 201.

### Prime Editing

[0589] In some embodiments, a fusion protein and/or a fusion partner can comprise a prime editing enzyme. When used herein, a prime editing enzyme can describe a protein, polypeptide, or fragment thereof that is capable of catalyzing the modification (insertion, deletion, or base-to-base conversion) of a target nucleotide or nucleotide sequence in a nucleic acid. A prime editing enzyme capable of catalyzing such a reaction includes a reverse transcriptase. A prime editing enzyme may require a prime editing guide RNA (pegRNA) to catalyze the modification. Such a pegRNA can be capable of identifying the nucleotide or nucleotide sequence in the target nucleic acid to be edited and encoding the new genetic information that replaces the targeted nucleotide or nucleotide sequence in the nucleic acid. A prime editing enzyme may require a prime editing guide RNA (pegRNA) and a single guide RNA to catalyze the modification.

[0590] In some embodiments, a prime editing enzyme is a protein, a polypeptide or a fragment thereof that is capable of catalyzing the modification (insertion, deletion, or base-to-base conversion) of a target nucleotide or nucleotide sequence in a nucleic acid. A prime editing enzyme capable of catalyzing such a reaction includes a reverse transcriptase. A prime editing enzyme may require a prime editing guide RNA (pegRNA) to catalyze the modification. Such a pegRNA can be capable of identifying the nucleotide or nucleotide sequence in the target nucleic acid to be edited and encoding the new genetic information that replaces the targeted nucleotide or nucleotide sequence in the nucleic acid. A prime editing enzyme may require a prime editing guide RNA (pegRNA) and a single guide RNA to catalyze the modification. In some embodiments, such a prime editing enzyme is an M-MLV RT enzyme or a mutant thereof. In some embodiments, the M-MLV RT enzyme comprises at least one mutation selected from D200N, L603W, T330P, T306K, and W313F relative to wildtype M-MLV RT enzyme.

### Recombinases

[0591] In some embodiments, the fusion partners comprise a recombinase domain. In some embodiments, the enzymatically inactive protein is fused with a recombinase. In some embodiments, the recombinase is a site-specific recombinase. In some embodiments, the fusion partners comprise a recombinase domain wherein the recombinase is a site-specific recombinase. In some embodiments, described herein is a programmed nuclease comprising reduced nuclease activity or no nuclease activity and fused with a recombinase, wherein the recombinase can be a site-specific recombinase. Such polypeptides can be used for site-directed transgene insertion. Examples of site-specific recombinases include a tyrosine recombinase (e.g., Cre, Flp or lambda integrase), a serine recombinase (e.g., gamma-delta resolvase, Tn3 resolvase, Sin resolvase, Gin invertase, Hin invertase, Tn5044 resolvase, IS607 transposase and integrase), or mutants or variants thereof. In some embodiments, the recombinase is a serine recombinase. Non-limiting examples of serine recombinases include, but are not limited to, gamma-delta resolvase, Tn3 resolvase, Sin resolvase, Gin invertase, Hin invertase, Tn5044 resolvase, IS607 transposase, and IS607 integrase. In some embodiments, the site-specific recombinase is an integrase. Non-limiting examples of integrases include, but are not limited to: Bxb1, wBeta, BL3, phiR4, A118, TG1, MR11, phi370, SPBc, TP901-1, phiRV, FC1, K38, phiBT1, and phiC31. Further discussion and examples of suitable recombinase fusion partners are described in U.S. Pat. No. 10,975,392, which is incorporated herein by reference in its entirety.

[0592] In some embodiments, the fusion protein comprises a linker that links the recombinase domain to the Cas-CRISPR domain of the effector protein. In some embodiments, the linker is The-Ser.

### Additional Fusion Partners

[0593] In some embodiments, the fusion partner is a nuclear localization signal (NLS). In some cases, said NLS may have a sequence of KRPAATKKAGQAKKKKEF (SEQ ID NO: 800). The NLS can be selected to match the cell type of interest, for example several NLSs are known to be functional in different types of eukaryotic cell e.g. in mammalian cells. Suitable NLSs include the SV40 large T antigen NLS (PKKKRKV, SEQ ID NO: 712) and the c-Myc NLS (PAAKRVKLD, SEQ ID NO: 801). In some embodiments, an NLS may be the SV40 large T antigen NLS or the c-Myc NLS. NLSs that are functional in plant cells are described in Chang et al., (Plant Signal Behav. 2013 October; 8(10):e25976). In some embodiments, an NLS sequence can be selected from the following consensus sequences: KR(K/R)R (SEQ ID NO: 802), K(K/R)RK (SEQ ID NO: 803); (P/R)XXKR(\hat{ }DE)(K/R) (SEQ ID NO: 804); KRX(W/F/Y)XXAF; (SEQ ID NO: 805); (R/P)XXKR(K/R)(\hat{ }DE) (SEQ ID NO: 806); LGKR(K/R)(W/F/Y) (SEQ ID NO: 807); KRX10-12K(KR)(KR) (SEQ ID NO: 808) or KRX10-12K(KR)X(K/R) (SEQ ID NO: 809). In some cases, (\hat{ }DE) means any amino acid besides Asp or Glu. In some cases, X10-12 means 10, 11, or 12 residues of X (any amino acid). In some cases a “/” means either residue 1 or residue 2, for example (K/R) means residue K or R. In some cases, the NLS is linked to an effector protein by an amine group, also referred to as a peptide bond, or by one or more amino acids.

[0594] In some embodiments, the nucleoplasmin NLS (KRPAATKKAGQAKKKKEF (SEQ ID NO: 800)) is linked or fused to the C-terminus of the effector protein. In some embodiments, the SV40 NLS (PKKKRKVGIHGVPAA) (SEQ ID NO: 810) is linked or fused to the N-terminus of the effector protein. In preferred embodiments, the nucleoplasmin NLS (SEQ ID NO: 800) is linked or fused to the C-terminus of the effector protein and the SV40 NLS (SEQ ID NO: 810) is linked or fused to the N-terminus of the effector protein.

[0595] Further suitable fusion partners include, but are not limited to, proteins (or fragments/domains thereof) that are boundary elements (e.g., CTCF), proteins and fragments thereof that provide periphery recruitment (e.g., Lamin A, Lamin B, etc.), protein docking elements (e.g., FKBP/FRB, Pil1/Aby1, etc.).

### Linkers for Fusion Partners

[0596] In general, effector proteins and fusion partners of a fusion effector protein are connected via a linker. The linker may comprise or consist of a covalent bond. The linker may comprise or consist of a chemical group. In some embodiments, the linker comprises an amino acid. In some cases, a linker comprises a bond or molecule that links a first polypeptide to a second polypeptide. In some instances, a peptide linker comprises at least two amino acids linked by an amide bond. In general, the linker connects a terminus of the effector protein to a terminus of the fusion partner. In some embodiments, the carboxy terminus of the effector protein is linked to the amino terminus of the fusion partner. In some embodiments, the carboxy terminus of the fusion partner is linked to the amino terminus of the effector protein.

[0597] In some instances, a terminus of the D2S effector protein is linked to a terminus of the fusion partner through an amide bond. In some instances, a D2S effector protein is coupled to a fusion partner via a linker protein. In some embodiments, a linker, comprises a bond or molecule that links a first polypeptide to a second polypeptide. A peptide linker comprises at least two amino acids linked by an amide bond. The linker protein may have any of a variety of amino acid sequences. A linker protein may comprise a region of rigidity (e.g., beta sheet, alpha helix), a region of flexibility, or any combination thereof. In some instances, the linker comprises small amino acids, such as glycine and alanine, that impart high degrees of flexibility. The ordinarily skilled artisan will recognize that design of a peptide conjugated to any desired element may include linkers that are all or partially flexible, such that the linker may include a flexible linker as well as one or more portions that confer less flexible structure. Suitable linkers include proteins of 4 linked amino acids to 40 linked amino acids in length, or between 4 linked amino acids and 25 linked amino acids in length. In some embodiments, when linked amino acids are described herein, it can refer to at least two amino acids linked by an amide bond.

[0598] These linkers may be produced by using synthetic, linker-encoding oligonucleotides to couple the proteins, or may be encoded by a nucleic acid sequence encoding a fusion protein (e.g., an effector protein coupled to a fusion partner). Examples of linker proteins include glycine polymers (G)n, glycine-serine polymers (including, for example, (GS)n, GSGGSn, GGSGGSn, and GGGSn, where n is an integer of at least one), glycine-alanine polymers, and alanine-serine polymers. Exemplary linkers may comprise amino acid sequences including, but not limited to, GS (SEQ ID NO: 169), GSGGS (SEQ ID NO: 170), GGSGGS (SEQ ID NO: 171), GGGS (SEQ ID NO: 172), GGSG (SEQ ID NO: 173), GGSGG (SEQ ID NO: 174), GSGSG (SEQ ID NO: 175), GSGGG (SEQ ID NO: 176), GGGSG (SEQ ID NO: 177), and GSSSG (SEQ ID NO: 178).

[0599] In some embodiments, an effector protein described herein is purified. For example, a D2S effector protein is purified for ex vivo ribonucleoprotein editing. In some instances, an effector protein is purified with a TEV-cleavable maltose binding protein (MBP) tag. In some instances, an effector protein comprises a His tag, a FLAG tag, a GFP tag, or a combination of tags. For example, an effector protein of SEQ ID NOs: 1-45, 202-293, or 728-731 can comprise a component (e.g. tag) disclosed in Table 37. In some instances, an effector protein comprises a T2A tag. In some cases, TEV cleavage occurs before the effector protein is introduced into a cell. After TEV cleavage, an effector protein's N terminus retains three additional amino acids (SerAsnAla; SNA), this also occurs when nuclear localization signal are added to the effector protein. In some cases, an effector protein purified with a TEV-cleavable maltose binding protein (MBP) tag is delivered to a cell with a lipid nanoparticle (LNP). In some cases, a TEV cleaved version of an effector protein is used for ex vivo purposes. In some cases, a TEV cleaved version of an effector protein is used for in vivo purposes.

[0600] In some embodiments, a guide RNA for editing a target nucleic acid comprises a sequence that is at least is at least 75%, at least 80%, at least 85%, at least 90%, at least 95%, at least 98%, at least 99% or 100% identical to any one of SEQ ID NOs: 715-727.

### Nuclease-Dead D2S Effector Proteins

[0601] In some instances, the D2S effector protein can comprise an enzymatically inactive (e.g., catalytically inactive) and/or “dead” (abbreviated by “d”) effector protein in combination (e.g., fusion) with a polypeptide comprising recombinase activity. Although a D2S effector protein normally has nuclease activity, in some instances, a D2S effector protein does not have nuclease activity. In some instances, an effector protein comprising at least 60%, at least 65%, at least 70%, at least 75%, at least 80%, at least 85%, at least 90%, at least 92%, at least 95%, at least 97%, at least 98%, at least 99%, or 100% sequence identity with any one of SEQ ID NO: 1-45, 202-293, or 728-731 is a nuclease-dead effector protein. In some instances, the effector protein comprising at least 60%, at least 65%, at least 70%, at least 75%, at least 80%, at least 85%, at least 90%, at least 92%, at least 95%, at least 97%, at least 98%, at least 99%, or 100% sequence identity with any one of SEQ ID NO: 1-45 and 202-293 is modified or engineered to be a nuclease-dead effector protein. In some instances, an effector protein comprising at least 60%, at least 65%, at least 70%, at least 75%, at least 80%, at least 85%, at least 90%, at least 92%, at least 95%, at least 97%, at least 98%, at least 99%, or 100% sequence identity with any one of SEQ ID NOs: 728-731 is a nuclease-dead effector protein.

[0602] In some embodiments, catalytic residues of a RuvC domain are a first aspartic acid (D), glutamic acid (E), and a second aspartic acid (D). In some embodiments, the catalytic active residues of CasM.19952 (SEQ ID NO: 23) are D267, E363, and D450. Many amino acid replacements of any catalytic residue can inactivate the nuclease. The most common mutations are converting these residues to alanine or to other amino acids that substitute the acid side chain while maintaining the structural similarity, e.g., such as D (aspartate) to N (asparagine), or E (glutamate) to Q (glutamine). In some embodiments, D267A, E363A, D450A, D267N, E363Q, D450N are all catalytically dead mutants of CasM.19952. In some embodiments, D267A is a catalytically inactive mutant of CasM.286251 (SEQ ID NO: 25).

[0603] D2S effector protein can comprise a modified form of a wild type counterpart. The modified form of the wild type counterpart can comprise an amino acid change (e.g., deletion, insertion, or substitution) that reduces the nucleic acid-cleaving activity of the effector protein. For example, a nuclease domain (e.g., HEPN domain) of a D2S effector polypeptide can be deleted or mutated so that it is no longer functional or comprises reduced nuclease activity. The modified form of the effector protein can have less than 90%, less than 80%, less than 70%, less than 60%, less than 50%, less than 40%, less than 30%, less than 20%, less than 10%, less than 5%, or less than 1% of the nucleic acid-cleaving activity of the wild-type counterpart. The modified form of an effector protein can have no substantial nucleic acid-cleaving activity. When an effector protein is a modified form that has no substantial nucleic acid-cleaving activity, it can be referred to as enzymatically inactive and/or dead. A dead D2S effector polypeptide can bind to a target nucleic acid sequence but may not cleave the target nucleic acid sequence. A dead D2S effector polypeptide can associate with a guide nucleic acid to activate or repress transcription of a target nucleic acid sequence.

### V. Multimeric Complexes

[0604] Compositions, systems, and methods of the present disclosure may comprise a multimeric complex or uses thereof, wherein the multimeric complex comprises multiple effector proteins that non-covalently interact with one another. A multimeric complex may comprise enhanced activity relative to the activity of any one of its effector proteins alone. For example, a multimeric complex comprising two D2S effector proteins may comprise greater nucleic acid binding affinity, cis-cleavage activity, and/or transcollateral cleavage activity than that of either of the D2S effector proteins provided in monomeric form. A multimeric complex may have an affinity for a target region of a target nucleic acid and is capable of catalytic activity (e.g., cleaving, nicking or modifying the nucleic acid) at or near the target region. Multimeric complexes may be activated when complexed with a guide nucleic acid. Multimeric complexes may be activated when complexed with a guide nucleic acid and a target nucleic acid. In some instances, the multimeric complex cleaves the target nucleic acid. In some instances, the multimeric complex nicks the target nucleic acid.

[0605] Various aspects of the present disclosure include compositions and methods comprising multiple effector proteins, and uses thereof, respectively. A D2S effector protein comprising at least 70% sequence identity to any one of SEQ ID NO: 1-SEQ ID NO: 45 and SEQ ID NO: 202 to SEQ ID NO: 293 may be provided with a second effector protein. A D2S effector protein comprising at least 70% sequence identity to any one of SEQ ID NO: 1-SEQ ID NO: 45 and SEQ ID NO: 202 to SEQ ID NO: 293 may be provided with a second effector protein. A D2S effector protein comprising at least 70% sequence identity to any one of SEQ ID NO: 728-731 may be provided with a second effector protein. Two effector proteins may target different nucleic acid sequences. Two effector proteins may target different types of nucleic acids (e.g., a first effector protein may target double- and single-stranded nucleic acids, and a second effector protein may only target single-stranded nucleic acids).

[0606] In some instances, multimeric complexes comprise at least one D2S effector protein, or a fusion protein thereof, comprising an amino acid sequence with at least 65%, at least 70%, at least 75%, at least 80%, at least 85%, at least 90%, at least 95% or 100% identity to any one of SEQ ID NOs: 1-45, 202-293, or 728-731. In some instances, multimeric complexes comprise at least one D2S effector protein or a fusion protein thereof, wherein the amino acid sequence of the D2S effector protein is at least 65%, at least 70%, at least 75%, at least 80%, at least 85%, at least 90%, at least 95% or 100% identical to any one of SEQ ID NOs: 1-45, 202-293, or 728-731.

[0607] In some instances, the multimeric complex is a dimer comprising two effector proteins of identical amino acid sequences. In some instances, the multimeric complex comprises a first effector protein and a second effector protein, wherein the amino acid sequence of the first effector protein is at least 90%, at least 92%, at least 94%, at least 96%, at least 98% identical, or at least 99% identical to the amino acid sequence of the second effector protein.

[0608] In some instances, the multimeric complex is a heterodimeric complex comprising at least two effector proteins of different amino acid sequences. In some instances, the multimeric complex is a heterodimeric complex comprising a first effector protein and a second effector protein, wherein the amino acid sequence of the first effector protein is less than 90%, less than 85%, less than 80%, less than 75%, less than 70%, less than 65%, less than 60%, less than 55%, less than 50%, less than 45%, less than 40%, less than 35%, less than 30%, less than 25%, less than 20%, less than 15%, or less than 10% identical to the amino acid sequence of the second effector protein.

[0609] In some instances, a multimeric complex comprises at least two effector proteins. In some instances, a multimeric complex comprises more than two effector proteins. In some instances, a multimeric complex comprises two, three or four effector proteins. In some instances, at least one effector protein of the multimeric complex comprises an amino acid sequence with at least 65%, at least 70%, at least 75%, at least 80%, at least 85%, at least 90%, at least 95% or 100% identity to any one of SEQ ID NOs: 1-45, 202-293, or 728-731. In some instances, each effector protein of the multimeric complex comprises an amino acid sequence with at least 65%, at least 70%, at least 75%, at least 80%, at least 85%, at least 90%, at least 95% or 100% identity to any one of SEQ ID NOs: 1-45, 202-293, or 728-731.

### VI. Engineered Guide RNAs

[0610] The compositions, systems, and methods of the present disclosure may comprise a guide nucleic acid, or a nucleic acid molecule (e.g., DNA molecule) encoding the guide nucleic acid, or a use thereof. When a guide nucleic acid is described herein, it can refer to a nucleic acid comprising: a first nucleotide sequence that hybridizes to a target nucleic acid; and a second nucleotide sequence that is capable of connecting an effector protein to the nucleic acid by either a) hybridizing to a portion of an additional nucleic acid that is bound by an effector protein (e.g., a tracrRNA) orb) being non-covalently bound by an effector protein. The first sequence may be referred to herein as a spacer sequence. In some instances, the second sequence may be referred to herein as a repeat sequence. In some instances, the second sequence may comprise a portion of, or all of a repeat sequence or a tracrRNA. In some instances, the first sequence is located 5′ of the second nucleotide sequence. In some instances, the first sequence is located 3′ of the second nucleotide sequence.

[0611] Provided herein are compositions comprising a D2S effector protein and an engineered guide RNA. In general, a guide nucleic acid is a nucleic acid molecule that binds to an effector protein (e.g., a Cas effector protein), thereby forming a ribonucleoprotein complex (RNP). In some instances, the engineered guide RNA imparts activity or sequence selectivity to the effector protein. In some embodiments a guide nucleic acid comprises a nucleic acid comprising: a first nucleotide sequence that hybridizes to a target nucleic acid; and a second nucleotide sequence that is capable of being non-covalently bound by an effector protein. The first sequence may be referred to herein as a spacer sequence. The second sequence may be referred to herein as a repeat sequence. In some instances, the first sequence is located 5′ of the second nucleotide sequence. In some instances, the first sequence is located 3′ of the second nucleotide sequence. Guide nucleic acids, when complexed with an effector protein, may bring the effector protein into proximity of a target nucleic acid. Sufficient conditions for hybridization of a guide nucleic acid to a target nucleic acid and/or for binding of a guide nucleic acid to an effector protein include in vivo physiological conditions of a desired cell type or in vitro conditions sufficient for assaying catalytic activity of a protein, polypeptide or peptide described herein, such as the nuclease activity of an effector protein. Guide nucleic acids may comprise DNA, RNA, or a combination thereof (e.g., RNA with a thymine base). Guide nucleic acids may include a chemically modified nucleobase or phosphate backbone. Guide nucleic acids may be referred to herein as a guide RNA (gRNA). However, a guide RNA is not limited to ribonucleotides, but may comprise deoxyribonucleotides and other chemically modified nucleotides.

[0612] In general, the engineered guide RNA comprises a CRISPR RNA (crRNA) that is at least partially complementary to a target nucleic acid. In some cases, the nucleotide sequence that hybridizes to a target nucleic acid may be referred to herein as a spacer sequence. In some instances, the engineered guide RNA comprises a trans-activating crRNA (tracrRNA), at least a portion of which interacts with the effector protein. In some embodiments, a trans-activating RNA (tracrRNA), is a nucleic acid that comprises a first sequence that is capable of being non-covalently bound by an effector protein. In some embodiments, tracrRNAs are covalently linked to a crRNA. The tracrRNA may hybridize to a portion of the guide RNA that does not hybridize to the target nucleic acid. In some instances, the crRNA and tracrRNA are provided as a single guide RNA (sgRNA). In some instances, a crRNA and tracrRNA function as two separate, unlinked molecules.

[0613] In some embodiments, engineered guide RNAs comprise a crRNA or a portion thereof (e.g., a repeat sequence or a spacer sequence). In some embodiments, the crRNA comprises a first sequence, often referred to herein as a spacer sequence, that hybridizes to a target sequence of a target nucleic acid, and a second sequence that hybridizes to a portion of a tracrRNA, often referred to herein as a repeat sequence. In some embodiments, the repeat sequence is capable of being non-covalently bound by an effector protein. In some embodiments, the crRNA is covalently linked to an additional nucleic acid that interacts with the effector protein. The crRNA may be linked to the additional nucleic acid via an internucleoside linkage (e.g, a phosphodiester bond or phosphorothioate bond). The crRNA may be linked to the additional nucleic acid via one or more linker nucleotides. In some embodiments, the additional nucleic acid comprises a tracrRNA. In some embodiments, the additional nucleic acid comprises an intermediary RNA. In such embodiments, the additional nucleic acid that interacts with the effector protein, for simplicity, can be referred to herein as a tracrRNA or tracrRNA sequence because such an additional nucleic acid can be based on or derived from a tracrRNA, thereby having all or a portion of a tracrRNA sequence. However, it is recognized that in such a context the additional nucleic acid is not a true tracrRNA because it does not act in trans. In some embodiments, a trans-activating RNA (tracrRNA) comprises a nucleic acid that comprises a first sequence that is capable of being non-covalently bound by an effector protein. TracrRNAs may comprise a second sequence that hybridizes to a portion of a crRNA, which may be referred to as a repeat hybridization sequence. In some embodiments, tracrRNAs are covalently linked to a crRNA. A tracrRNA may include deoxyribonucleosides, ribonucleosides, chemically modified nucleosides, or any combination thereof. A tracrRNA may be separate from, but form a complex with, a crRNA and an effector protein. A tracrRNA may include a nucleotide sequence that hybridizes with a portion of a crRNA. A tracrRNA may comprise a secondary structure (e.g., one or more hairpin loops) that facilitates the binding of an effector protein to a guide nucleic acid and/or modification activity of an effector protein on a target nucleic acid. A tracrRNA may include a repeat hybridization region and a hairpin region. The repeat hybridization region may hybridize to all or part of the repeat sequence of a guide nucleic acid. The repeat hybridization region may be positioned 3′ of the hairpin region. The repeat hybridization region may be positioned 5′ of the hairpin region. The hairpin region may include a first sequence, a second sequence that is reverse complementary to the first sequence, and a stem-loop linking the first sequence and the second sequence.

[0614] In some instances, the engineered guide RNA comprises a second sequence, at least a portion of which interacts with the effector protein. In some instances, the second sequence may be referred to herein as a repeat sequence. In some instances, the second sequence may be referred to herein as a handle sequence. In some instances, the handle sequence may comprise a portion of, or all of a repeat sequence.

[0615] Guide nucleic acids are often referred to as “guide RNA.” However, a guide nucleic acid may comprise deoxyribonucleotides. The term “guide RNA,” as well as crRNA and tracrRNA, includes guide nucleic acids comprising DNA bases and RNA bases. The term “guide RNA,” which can include crRNA, tracrRNA, second sequence, repeat sequence, handle sequence, or any combination thereof, includes guide nucleic acids comprising DNA bases and RNA bases.

[0616] Guide nucleic acids described herein may bind to a D2S effector protein or multimeric complex thereof, wherein the amino acid sequence of the D2S effector protein is at least 70%, at least 75%, at least 80%, at least 85%, at least 90%, at least 92%, at least 95%, at least 97%, at least 98%, at least 99%, or 100% identical to any one of SEQ ID NO: 1-45, 202-293, or 728-731.

[0617] In general, the crRNA comprises a spacer region that hybridizes to a target sequence of a target nucleic acid, and a repeat region that interacts with the D2S effector effector protein. The repeat region may also be referred to as a “protein-binding segment.” Typically, the repeat region is adjacent to the spacer region. For example, a guide RNA that interacts with the D2S effector effector protein comprises a repeat region that is 5′ of the spacer region. The spacer region of the guide RNA may comprise complementarity with (e.g., hybridize to) a target sequence of a target nucleic acid. In some cases, the spacer region is 15-28 linked nucleosides in length. In some cases, the spacer region is 15-26, 15-24, 15-22, 15-20, 15-18, 16-28, 16-26, 16-24, 16-22, 16-20, 16-18, 17-26, 17-24, 17-22, 17-20, 17-18, 18-26, 18-24, or 18-22 linked nucleosides in length. In some cases, the spacer region is 18-24 linked nucleosides in length. In some cases, the spacer region is at least 15 linked nucleosides in length. In some cases, the spacer region is at least 16, 18, 20, or 22 linked nucleosides in length. In some cases, the spacer region comprises at least 10, 11, 12, 13, 14, 15, 16, 17, 18, 19, 20, 21, 22, 23, 24, 25, 26, 27, 28, 29, or 30 nucleotides. In some cases, the spacer region is at least 17 linked nucleosides in length. In some cases, the spacer region is at least 18 linked nucleosides in length. In some cases, the spacer region is at least 20 linked nucleosides in length. In some cases, the spacer region is at least 80%, at least 85%, at least 90%, at least 95% or 100% complementary to a target sequence of the target nucleic acid. In some cases, the spacer region is 100% complementary to the target sequence of the target nucleic acid. In some cases, the spacer region comprises at least 15 contiguous nucleobases that are complementary to the target nucleic acid.

[0618] In some embodiments, complementary and “complementarity, with reference to a nucleic acid molecule or nucleotide sequence, comprise the characteristic of a polynucleotide having nucleotides that base pair with their Watson-Crick counterparts (C with G; or A with T) in a reference nucleic acid. For example, when every nucleotide in a polynucleotide forms a base pair with a reference nucleic acid, that polynucleotide is said to be 100% complementary to the reference nucleic acid. In a double stranded DNA or RNA sequence, the upper (sense) strand sequence is in general, understood as going in the direction from its 5′- to 3′-end, and the complementary sequence is thus understood as the sequence of the lower (antisense) strand in the same direction as the upper strand. Following the same logic, the reverse sequence is understood as the sequence of the upper strand in the direction from its 3′- to its 5′-end, while the ‘reverse complement’ sequence or the ‘reverse complementary’ sequence is understood as the sequence of the lower strand in the direction of its 5′- to its 3′-end. Each nucleotide in a double stranded DNA or RNA molecule that is paired with its Watson-Crick counterpart called its complementary nucleotide.

[0619] In some instances, the guide RNA does not comprise a tracrRNA. In some cases, a D2S effector protein does not require a tracrRNA to locate and/or cleave a target nucleic acid. In some instances, the crRNA of the guide nucleic acid comprises a repeat region and a spacer region, wherein the repeat region binds to the D2S effector protein and the spacer region hybridizes to a target sequence of the target nucleic acid. The repeat sequence of the crRNA may interact with a D2S effector protein, allowing for the guide nucleic acid and the D2S effector protein to form an RNP complex. In some instances, the guide nucleic acid comprises a crRNA comprising a spacer region, and a repeat region or handle region wherein at least a portion of the repeat or handle region binds to the D2S effector protein and the spacer region hybridizes to a target sequence of the target nucleic acid. The repeat sequence of the nucleic acid may interact with a D2S effector protein, allowing for the guide nucleic acid and the D2S effector protein to form an RNP complex.

[0620] In some cases, a D2S effector protein or a multimeric complex thereof cleaves a precursor RNA (“pre-crRNA”) to produce a guide RNA, also referred to as a “mature guide RNA.” A D2S effector protein that cleaves pre-crRNA to produce a mature guide RNA is said to have pre-crRNA processing activity. In some cases, a repeat region of a guide RNA comprises mutations or truncations relative to respective regions in a corresponding pre-crRNA.

[0621] In some embodiments, the term “region” as used herein may be used to describe a portion of or all of a corresponding sequence, for example, a spacer region is understood to comprise a portion of or all of a spacer sequence.

[0622] The guide RNA may bind to a target nucleic acid (e.g., a single strand of a target nucleic acid) or a portion thereof. The guide nucleic acid may bind to a target nucleic acid such as a nucleic acid from a bacterium, a virus, a parasite, a protozoa, a fungus or other agents responsible for a disease, or an amplicon thereof. The target nucleic acid may comprise a mutation, such as a single nucleotide polymorphism (SNP). A mutation may confer for example, resistance to a treatment, such as antibiotic treatment. The guide nucleic acid may bind to a target nucleic acid, such as DNA or RNA, from a cancer gene or gene associated with a genetic disorder, or an amplicon thereof, as described herein. The guide nucleic acid may comprise a first region complementary to a target nucleic acid (FR1) and a second region that is not complementary to the target nucleic acid (FR2). In some cases, FR1 is located 5′ to FR2 (FR1-FR2). In some cases, FR2 is located 5′ to FR1 (FR2-FR1).

[0623] In some cases, the guide comprises 10, 11, 12, 13, 14, 15, 16, 17, 18, 19, 20, 21, 22, 23, 24, 25, 26, 27, 28, 29, or 30 linked nucleosides. In general, a guide nucleic acid comprises at least linked nucleosides. In some instances, a guide nucleic acid comprises at least 25 linked nucleosides. A guide nucleic acid may comprise 10 to 50 linked nucleosides. In some cases, the guide nucleic acid comprises or consists essentially of about 12 to about 80 linked nucleosides, about 12 to about 50, about 12 to about 45, about 12 to about 40, about 12 to about 35, about 12 to about 30, about 12 to about 25, from about 12 to about 20, about 12 to about 19, about 19 to about 20, about 19 to about 25, about 19 to about 30, about 19 to about 35, about 19 to about 40, about 19 to about 45, about 19 to about 50, about 19 to about 60, about 20 to about 25, about 20 to about 30, about 20 to about 35, about 20 to about 40, about 20 to about 45, about 20 to about 50, or about 20 to about 60 linked nucleosides. In some cases, the guide nucleic acid has about 10 to about 60, about 20 to about 50, or about 30 to about 40 linked nucleosides.

[0624] The terms “nucleotide” and “nucleoside” when used in the context of a nucleic acid molecule having multiple residues are used interchangeably and mean the sugar and base of the residue contained in the nucleic acid molecule. The term “nucleobase” when used in the context of a nucleic acid molecule can refer to the base of the residue contained in the nucleic acid molecule, for example, the base of a nucleotide or a nucleoside.

[0625] In some embodiments, the guide nucleic acid comprises a nucleotide sequence as described herein (e.g., TABLE 2). Such nucleotide sequences described herein (e.g., TABLE 2) may be described as a nucleotide sequence of either DNA or RNA, however, no matter the form the sequence is described, it is readily understood that such nucleotide sequences can be revised to be RNA or DNA, as needed, for describing a sequence within a guide nucleic acid itself or the sequence that encodes a guide nucleic acid, such as a nucleotide sequence described herein for a vector. Similarly, disclosure of the nucleotide sequences described herein (e.g., TABLE 2) also discloses the complementary nucleotide sequence, the reverse nucleotide sequence, and the reverse complement nucleotide sequence, any one of which can be a nucleotide sequence for use in a guide nucleic acid as described herein.

[0626] TABLE 2 provides exemplary compositions comprising D2S effector proteins, crRNAs, and tracrRNAs. Each row in TABLE 2 represents an exemplary composition. In some instances, the crRNA comprises a nucleobase sequence of any one of SEQ ID NOs: 46-90 as shown in TABLE 2. In some instances, the nucleobase sequence of the crRNA is at least 65%, at least 70%, at least 75%, at least 80%, at least 85%, at least 90%, at least 95%, or 100% identical to any one of SEQ ID NO: 46-SEQ ID NO: 90. In some instances, the tracrRNA comprises a nucleobase sequence of any one of SEQ ID NOs: 91-148 as shown in TABLE 2. In some instances, the nucleobase sequence of the tracrRNA is at least 65%, at least 70%, at least 75%, at least 80%, at least 85%, at least 90%, at least 95%, or 100% identical to any one of SEQ ID NO: 91-SEQ ID NO: 148.

TABLE 2
Exemplary Compositions of D2S Effector Protein, crRNA and tracrRNA

| Comp. | | | |
|---|---|---|---|
| No. | Protein | crRNA | tracrRNA |
| 1 | CasM.298706 | SEQ ID NO: 46 | SEQ ID NO: 91 |
| | (SEQ ID NO: 1) | | |
| 2 | CasM.280604 | SEQ ID NO: 47 | SEQ ID NO: 92 |
| | (SEQ ID NO: 2) | | |
| 3 | CasM.281060 | SEQ ID NO: 48 | SEQ ID NO: 93 |
| | (SEQ ID NO: 3) | | |
| 4 | CasM.284933 | SEQ ID NO: 49 | SEQ ID NO: 94 |
| | (SEQ ID NO: 4) | | |
| 5 | CasM.287908 | SEQ ID NO: 50 | SEQ ID NO: 95 |
| | (SEQ ID NO: 5) | | |
| 6 | CasM.288518 | SEQ ID NO: 51 | SEQ ID NO: 96 |
| | (SEQ ID NO: 6) | | |
| 7 | CasM.293891 | SEQ ID NO: 52 | SEQ ID NO: 97 |
| | (SEQ ID NO: 7) | | |
| 8 | CasM.294270 | SEQ ID NO: 53 | SEQ ID NO: 98 |
| | (SEQ ID NO: 8) | | |
| 9 | CasM.294491 | SEQ ID NO: 54 | SEQ ID NO: 99 |
| | (SEQ ID NO: 9) | | |
| 10 | CasM.295047 | SEQ ID NO: 55 | SEQ ID NO: 100 |
| | (SEQ ID NO: 10) | | |
| 11 | CasM.299588 | SEQ ID NO: 56 | SEQ ID NO: 101 |
| | (SEQ ID NO: 11) | | |
| 12 | CasM.277328 | SEQ ID NO: 57 | SEQ ID NO: 102 |
| | (SEQ ID NO: 12) | | |
| 13 | CasM.297894 | SEQ ID NO: 58 | SEQ ID NO: 103 |
| | (SEQ ID NO: 13) | | |
| 14 | CasM.291449 | SEQ ID NO: 59 | SEQ ID NO: 104 |
| | (SEQ ID NO: 14) | | |
| 15 | CasM.291449 | SEQ ID NO: 59 | SEQ ID NO: 105 |
| | (SEQ ID NO: 14) | | |
| 16 | CasM.297599 | SEQ ID NO: 60 | SEQ ID NO: 106 |
| | (SEQ ID NO: 15) | | |
| 17 | CasM.297599 | SEQ ID NO: 60 | SEQ ID NO: 107 |
| | (SEQ ID NO: 15) | | |
| 18 | CasM.286588 | SEQ ID NO: 61 | SEQ ID NO: 108 |
| | (SEQ ID NO: 16) | | |
| 19 | CasM.286588 | SEQ ID NO: 61 | SEQ ID NO: 109 |
| | (SEQ ID NO: 16) | | |
| 20 | CasM.286910 | SEQ ID NO: 62 | SEQ ID NO: 110 |
| | (SEQ ID NO: 17) | | |
| 21 | CasM.286910 | SEQ ID NO: 62 | SEQ ID NO: 111 |
| | (SEQ ID NO: 17) | | |
| 22 | CasM.292335 | SEQ ID NO: 63 | SEQ ID NO: 112 |
| | (SEQ ID NO: 18) | | |
| 23 | CasM.292335 | SEQ ID NO: 63 | SEQ ID NO: 113 |
| | (SEQ ID NO: 18) | | |
| 24 | CasM.293576 | SEQ ID NO: 64 | SEQ ID NO: 114 |
| | (SEQ ID NO: 19) | | |
| 25 | CasM.293576 | SEQ ID NO: 64 | SEQ ID NO: 115 |
| | ((SEQ ID NO: 19) | | |
| 26 | CasM.294537 | SEQ ID NO: 65 | SEQ ID NO: 116 |
| | (SEQ ID NO: 20) | | |
| 27 | CasM.294537 | SEQ ID NO: 65 | SEQ ID NO: 117 |
| | (SEQ ID NO: 20) | | |
| 28 | CasM.298538 | SEQ ID NO: 66 | SEQ ID NO: 118 |
| | (SEQ ID NO: 21) | | |
| 29 | CasM.298538 | SEQ ID NO: 66 | SEQ ID NO: 119 |
| | (SEQ ID NO: 21) | | |
| 30 | CasM.19924 | SEQ ID NO: 67 | SEQ ID NO: 120 |
| | (SEQ ID NO: 22) | | |
| 32 | CasM.19952 | SEQ ID NO: 68 | SEQ ID NO: 120 |
| | (SEQ ID NO: 23) | | |
| 34 | CasM.274559 | SEQ ID NO: 69 | SEQ ID NO: 121 |
| | (SEQ ID NO: 24) | | |
| 36 | CasM.286251 | SEQ ID NO: 70 | SEQ ID NO: 122 |
| | (SEQ ID NO: 25) | | |
| 38 | CasM.288480 | SEQ ID NO: 71 | SEQ ID NO: 120 |
| | (SEQ ID NO: 26) | | |
| 40 | CasM.288668 | SEQ ID NO: 72 | SEQ ID NO: 123 |
| | (SEQ ID NO: 27) | | |
| 41 | CasM.289206 | SEQ ID NO: 73 | SEQ ID NO: 121 |
| | (SEQ ID NO: 28) | | |
| 43 | CasM.290598 | SEQ ID NO: 74 | SEQ ID NO: 121 |
| | (SEQ ID NO: 29) | | |
| 45 | CasM.290816 | SEQ ID NO: 75 | SEQ ID NO: 124 |
| | (SEQ ID NO: 30) | | |
| 47 | CasM.295071 | SEQ ID NO: 76 | SEQ ID NO: 122 |
| | (SEQ ID NO: 31) | | |
| 49 | CasM.295231 | SEQ ID NO: 77 | SEQ ID NO: 124 |
| | (SEQ ID NO: 32) | | |
| 51 | CasM.292139 | SEQ ID NO: 78 | SEQ ID NO: 125 |
| | (SEQ ID NO: 33) | | |
| 52 | CasM.292139 | SEQ ID NO: 78 | SEQ ID NO: 126 |
| | (SEQ ID NO: 33) | | |
| 54 | CasM.279423 | SEQ ID NO: 79 | SEQ ID NO: 127 |
| | (SEQ ID NO: 34) | | |
| 55 | CasM.20054 | SEQ ID NO: 80 | SEQ ID NO: 128 |
| | (SEQ ID NO: 35) | | |
| 56 | CasM.20054 | SEQ ID NO: 80 | SEQ ID NO: 129 |
| | (SEQ ID NO: 35) | | |
| 57 | CasM.282673 | SEQ ID NO: 81 | SEQ ID NO: 130 |
| | (SEQ ID NO: 36) | | |
| 58 | CasM.282673 | SEQ ID NO: 81 | SEQ ID NO: 131 |
| | (SEQ ID NO: 36) | | |
| 59 | CasM.282952 | SEQ ID NO: 82 | SEQ ID NO: 132 |
| | (SEQ ID NO: 37) | | |
| 60 | CasM.282952 | SEQ ID NO: 82 | SEQ ID NO: 133 |
| | (SEQ ID NO: 37) | | |
| 61 | CasM.283262 | SEQ ID NO: 83 | SEQ ID NO: 134 |
| | (SEQ ID NO: 38) | | |
| 62 | CasM.283262 | SEQ ID NO: 83 | SEQ ID NO: 135 |
| | (SEQ ID NO: 38) | | |
| 63 | CasM.284833 | SEQ ID NO: 84 | SEQ ID NO: 136 |
| | (SEQ ID NO: 39) | | |
| 64 | CasM.284833 | SEQ ID NO: 84 | SEQ ID NO: 137 |
| | (SEQ ID NO: 39) | | |
| 65 | CasM.287700 | SEQ ID NO: 85 | SEQ ID NO: 138 |
| | ((SEQ ID NO: 40) | | |
| 66 | CasM.291507 | SEQ ID NO: 86 | SEQ ID NO: 139 |
| | (SEQ ID NO: 41) | | |
| 67 | CasM.291507 | SEQ ID NO: 86 | SEQ ID NO: 140 |
| | (SEQ ID NO: 41) | | |
| 68 | CasM.293410 | SEQ ID NO: 87 | SEQ ID NO: 141 |
| | (SEQ ID NO: 42) | | |
| 69 | CasM.293410 | SEQ ID NO: 87 | SEQ ID NO: 142 |
| | (SEQ ID NO: 42) | | |
| 70 | CasM.295105 | SEQ ID NO: 88 | SEQ ID NO: 143 |
| | (SEQ ID NO: 43) | | |
| 71 | CasM.295105 | SEQ ID NO: 88 | SEQ ID NO: 144 |
| | (SEQ ID NO: 43) | | |
| 72 | CasM.295187 | SEQ ID NO: 89 | SEQ ID NO: 145 |
| | (SEQ ID NO: 44) | | |
| 73 | CasM.295187 | SEQ ID NO: 89 | SEQ ID NO: 146 |
| | (SEQ ID NO: 44) | | |
| 74 | CasM.295929 | SEQ ID NO: 90 | SEQ ID NO: 147 |
| | (SEQ ID NO: 45) | | |
| 75 | CasM.295929 | SEQ ID NO: 90 | SEQ ID NO: 148 |
| | (SEQ ID NO: 45) | | |

[0627] TABLE 3 provides exemplary compositions comprising D2S effector proteins and sgRNAs. Each row in TABLE 3 represents an exemplary composition. In some instances, the sgRNA comprises a nucleobase sequence of any one of SEQ ID NOs: 22-33 as shown in TABLE 3. In some instances, the nucleobase sequence of the sgRNA is at least 65%, at least 70%, at least 75%, at least 80%, at least 85%, at least 90%, at least 95%, at least 97%, or at least 98%, at least 99%, or 100% identical to any one of SEQ ID NO: 22-SEQ ID NO: 33.

TABLE 3
Exemplary Compositions of D2S Effector Protein and sgRNA

| Comp. No | Effector protein | SgRNA |
|---|---|---|
| 31 | CasM.19924 (SEQ ID NO: 22) | SEQ ID NO: 149 |
| 33 | CasM.19952 (SEQ ID NO: 23) | SEQ ID NO: 149 |
| 35 | CasM.274559 (SEQ ID NO: 24) | SEQ ID NO: 150 |
| 37 | CasM.286251 (SEQ ID NO: 25) | SEQ ID NO: 151 |
| 39 | CasM.288480 (SEQ ID NO: 26) | SEQ ID NO: 149 |
| 42 | CasM.289206 (SEQ ID NO: 28) | SEQ ID NO: 150 |
| 44 | CasM.290598 (SEQ ID NO: 29) | SEQ ID NO: 150 |
| 46 | CasM.290816 (SEQ ID NO: 30) | SEQ ID NO: 152 |
| 48 | CasM.295071 (SEQ ID NO: 31) | SEQ ID NO: 151 |
| 51 | CasM.295231 (SEQ ID NO: 32) | SEQ ID NO: 152 |
| 53 | CasM.292139 (SEQ ID NO: 33) | SEQ ID NO: 153 or RNA |
| | | sequence: |
| | | UUAUUAGAAAUGAAAUAUU |
| | | UUCUAAUGGGGUUGUUGGA |
| | | AAGAGCUUUUACUGAAAUU |
| | | UGUAAAGGUGCCCUGAACU |
| | | UGAGAAUUGAAAAAUUACU |
| | | CGAGGAAAUGGUACAUCCA |
| | | ACUAUUAAAUACUCGUAUU |
| | | GCU (SEQ ID NO: 937) |

[0628] In some instances, a guide nucleic acid can comprise a nucleotide sequence (e.g., a repeat sequence) as shown in TABLE 38. In some instances, a crRNA or a sgRNA comprises a repeat sequence as shown in TABLE 38. In some instances, a guide nucleic acid comprises a sequence that is at least 70%, at least 75%, at least 80%, at least 85%, at least 90%, or at least 95% identical to a sequence in TABLE 38. In some instances, a guide nucleic acid comprises a sequence that is at least 70%, at least 75%, at least 80%, at least 85%, at least 90%, or at least 95% identical to any one of SEQ ID Nos: 630, 641, or 827-929. In some instances, a crRNA or a sgRNA comprises a sequence that is at least 70%, at least 75%, at least 80%, at least 85%, at least 90%, or at least 95% identical to any one of SEQ ID Nos: 630, 641, or 827-929. In some instances, guide nucleic acids comprise at least 8, at least 9, at least 10, at least 11, at least 12, at least 13, at least 14, at least 15, at least 16, at least 17, at least 18, at least 19, at least 20 at least 25, at least 30, or at least 35 contiguous nucleotides of a nucleotide sequence in TABLE 38.

TABLE 38
Examples Of Repeat Sequences Associated With Various
Effector Proteins

| | Type of | | |
|---|---|---|---|
| Associated | Guide | | |
| Effector SEQ | Nucleic | | Seq ID |
| ID NO: | Acid | Examples of Repeat Sequences | NO |
| 1 | crRNA | CGUUGCAGCUCGCACGUUGGCACUGGUUGAAGG | 827 |
| 1 | crRNA | CGUUGCAGCUCGCACGUUGGCACUGGGUUGAAG | 828 |
| | | G | |
| 1 | SgRNA | UUGGCACUGGUUGAAGG | 829 |
| 1 | sgRNA | CACUGGUUGAAGG | 830 |
| 2 | crRNA | GUUGCAACUCACGCGCGUAUGUGGCUUGAAGG | 831 |
| 3 | crRNA | GUUGCAAUUCAUAUCUCCGGGUGGAUUGAAGG | 832 |
| 4 | sgRNA | AGCGUGUGGCUUGAAGG | 833 |
| 4 | sgRNA | UGUGGCUUGAAGG | 834 |
| 4, 10 | crRNA | GUUGCAGCGUGCGCGAGCGUGUGGCUUGAAGG | 835 |
| 5 | crRNA | GUUGCAACUCGCACGUGAAUGCGACUUGAAGG | 836 |
| 5 | sgRNA | UGAAUGCGACUUGAAGG | 837 |
| 6 | crRNA | GAUGCAACUCGUGUGUAUGUGCGAGUUGAAGG | 838 |
| 7 | crRNA | GACGCAACUCGCGCGCGGGCAUGUAUUGAGGG | 839 |
| 8 | crRNA | GAUGCAUCUGACACAGCUGGGUGAGUUGAAGG | 840 |
| 8 | sgRNA | GCUGGGUGAGUUGAAGG | 841 |
| 9 | crRNA | GUUGCAACACAUGUAUGUGGGUGAGUUGAAGG | 842 |
| 11 | crRNA | GUUGCAAUUUGUAUACGAGUGUGACUUGAAGG | 843 |
| 12 | crRNA | GCUGCAACACGCGCGGGUACGCGGGUUGAAGG | 844 |
| 13 | crRNA | GUUGCAACUCGCACGUUGGCACUGAUUGAAGG | 845 |
| 14 | crRNA | GCUGUAGCCCUGCUCAAAUUGUAGGGCGCAUGC | 846 |
| | | AGG | |
| 14, 15, 16 | crRNA | GUUGUAGUCGACCUGAAUCUGUGGGGUGCUUAC | 847 |
| | | AGG | |
| 14, 16, 19 | sgRNA | UGUGGGGUGCUUACAGG | 848 |
| 16 | crRNA | GGUGUAUGUAACCGCAAUUUGAAGGGUGCAUAC | 849 |
| | | AGG | |
| 17, 20 | crRNA | GUUGGAAUCGACCUUAAUUUGAGGUGUGCUUAC | 850 |
| | | AGG | |
| 18 | crRNA | GCUGAAAGAGCAGAGAAUUUGUUGUGUGCAUA | 851 |
| | | CAGG | |
| 19 | crRNA | GUUGGAGUCGGCUUGAAUCUGCGGGGUGCUUAC | 852 |
| | | AGG | |
| 21 | crRNA | GUUGUAAGAGACCCGAAUUUUAGCUGUGUAUAC | 853 |
| | | AGG | |
| 22 | crRNA | GUUGUGAAUGCAGGCAUUUUUGAUGGUAAAUC | 854 |
| | | CAAC | |
| 22, 23, 24, 25, | sgRNA | UGGUACAUCCAAC | 630 |
| 26, 28, 29. 30, | | | |
| 31, 32, 33, 34, | | | |
| 207, 208, 217, | | | |
| 219, 222, 229, | | | |
| 236, 237, 238, | | | |
| 23 | crRNA | ACUGUCAGACAAUGCAAAAUGUGUGGUACAUCC | 855 |
| | | AAC | |
| 23 | sgRNA | UGGUACAUCC | 856 |
| 23 | sgRNA | UGGGGCAGUUGGUUGCCCUUAGCCUGAGGCAUU | 857 |
| | | UAUUGCACUCGGGAAGUACCAUUACAUCCAAC | |
| 23 | sgRNA | UGGUACAUCCAACUCUAGGCGCC | 858 |
| 23 | sgRNA | AAUGGUACAUCCAAC | 859 |
| 23 | sgRNA | UGGUACAUCCAACUCUAGGC | 860 |
| 23 | sgRNA | UGGUACAUCCAACUCUAGGCGC | 861 |
| 23 | sgRNA | UGGUACAUCCAACUCUAGGCG | 862 |
| 23 | sgRNA | UGGUACAUCCAACUCUAGG | 863 |
| 23 | sgRNA | AAAUGGUACAUCCAAC | 864 |
| 23 | sgRNA | UGGUACAUCCAACUCU | 865 |
| 23 | sgRNA | UGGUACAUCCAACUC | 866 |
| 23 | sgRNA | UGGUACAUCCAACU | 867 |
| 23 | sgRNA | UGGUACAUCCAACUCUAG | 868 |
| 23 | sgRNA | UGGUAUAUCCAAC | 869 |
| 23 | sgRNA | UGGUACAUCCAACUCUA | 870 |
| 23 | sgRNA | AUGGUACAUCCAAC | 871 |
| 23 | sgRNA | UGGUACAUCCAA | 872 |
| 23 | sgRNA | UGGUACAUCCA | 873 |
| 24, 34, 226 | crRNA | GCUGUCAGUAGUAGUAAAAAUGGGGGUACAUCC | 874 |
| | | AAC | |
| 25, 31 | crRNA | ACUGUCAGUACAUGCAAAAAUGAGGGUACAUCC | 875 |
| | | AAC | |
| 26 | crRNA | ACUGUCAGACAAUGCAAAAUGAGUGGUACAUCC | 876 |
| | | AAC | |
| 27 | crRNA | GCUGUUAGAACAUACAAAAUGAAAGGUACAUCC | 877 |
| | | AAC | |
| 28 | crRNA | GCUGCAUGUCAUGGCAAAAGGAAAGGUACAUCC | 878 |
| | | AAC | |
| 29 | crRNA | GCUGUCAGACACCUAAAAAAUGAGGGUACAUCC | 879 |
| | | AAC | |
| 30, 32 | crRNA | GCUGUGAGUCACAGUAAAAAUGAAGGUAUAUCC | 880 |
| | | AAC | |
| 33 | crRNA | GAUGUAUAUGCUAUGAUUUUGUAUGGUACAUC | 881 |
| | | CAAC | |
| 34, 211, 230 | crRNA | GUUGCAGAACCCGAAUAGACGAAUGAAGGAAUG | 882 |
| | | CAAC | |
| 35 | crRNA | GUUGAGCUCUGCAUUACGCAGAUGAAUGACGAG | 883 |
| 35, 36, 38, 39, | crRNA | GAUAUAUCUUGUAUGCAUAUGUAGGUUGUGAG | 884 |
| 41,42, 43,44, | | | |
| 212 | | | |
| 35,36,38, 40, | SgRNA | GUUGCAACUUACGCAUAGGUGUAAAAUACGAGG | 885 |
| 41, 42, 43, 210 | | | |
| 36 | crRNA | GAUGCAACUUAGAUGCAUAUGUAAGUUGUGAG | 886 |
| 36,37,38,41, | crRNA | GUUGCAAUGAACGUAUGUGCAUGAGGUGUGAG | 887 |
| 42, 43, 45 | | | |
| 36, 38, 42, 43, | sgRNA | GUUGCAAUUCGUAUGCGCAGGUAAGUUUCGAG | 888 |
| 234 | | | |
| 36, 37, 38, 42, | sgRNA | UGUGCAUGAGGUGUGAG | 889 |
| 43, 45, | | | |
| 37 | crRNA | GUUGCAAUCUGCGUACAGGCGUAAGAUGUGAG | 890 |
| 37 | sgRNA | CAGGCGUAAGAUGUGAG | 891 |
| 38, 43 | crRNA | GAUCAUAUCUGCUUGUAUGGGUAUGCUGCGAG | 892 |
| 38 | sgRNA | UAUGGGUAUGCUGCGAG | 893 |
| 39, 41 | crRNA | GUUGCAACUUACGCAUAGGUGUAAAAUACGAG | 894 |
| 40 | crRNA | GAUUAUAUCUGCUUGUAUGGGUAUACUGCGAG | 895 |
| 42 | crRNA | UCAGCUCACAACCUACAUAUGCAUACAAGAUAU | 896 |
| | | AUCGU | |
| 44 | sgRNA | CAUAUGUAGGUUGUGAG | 897 |
| 44 | sgRNA | UGUAGGUUGUGAG | 898 |
| 45 | sgRNA | CAUGAGGUGUGAG | 899 |
| 202, 205, 213, | sgRNA | AGGUACAUCCAAC | 641 |
| 233 | | | |
| 203, 209 | sgRNA | UGCGGUGUAAUUCGAGG | 900 |
| 204 | crRNA | GAUGUGAACGACCUUUUUUUGCGGUGUGCUUCG | 901 |
| | | AGG | |
| 206 | crRNA | GGUGGAUAUCAUCUUAAAAAGUGAGGUACAUCC | 902 |
| | | AAC | |
| 209 | crRNA | GGUGUGAACGACCUUUUUUUGCGGUGUAAUUCG | 903 |
| | | AGG | |
| 209 | sgRNA | UUGCGGUGUACUUCGAGG | 904 |
| 211 | sgRNA | AGAAGAAGGAUUGGGAC | 905 |
| 212 | crRNA | AAUGUGAACGACCUUCUUUUGCGGUGUACUUCG | 906 |
| | | AGG | |
| 214 | sgRNA | AAGGUUGAUACAGC | 907 |
| 215 | crRNA | GCUGUAAGUCAUGGAAAAAUGGUGAGUACAUCC | 908 |
| | | AAC | |
| 215 | sgRNA | AUGGUGAGUACAUCCAAC | 909 |
| 216 | sgRNA | GAGCACAUCCAAC | 910 |
| 217 | sgRNA | GGGUACAUCCAAC | 911 |
| 218 | crRNA | GUUGCGUUUGCCCGUGAUUUCGGGUGUGUAUAC | 912 |
| | | AGG | |
| 220 | sgRNA | AGGUAUAUCCAAC | 913 |
| 221 | crRNA | GGCGUAUGUCUACCUGAAAAAGAAGGUAUAUCC | 914 |
| | | AAC | |
| 223 | sgRNA | GGCUACAUACAGC | 915 |
| 224 | crRNA | GGUGUAUGUGCACCAUAUAUGUAGGUGACAUAC | 916 |
| | | AGC | |
| 226, 235 | sgRNA | AAAACAAGGAUUGAAAC | 917 |
| 227 | crRNA | GAUGUGAACGACCUUUUUUUGCGGUGUACUUCG | 918 |
| | | AGG | |
| 227 | sgRNA | GUGUACUUCGAGG | 919 |
| 228 | crRNA | GAUGUAAAUCAUCUAUAAAAGAAAGGUACAUCC | 920 |
| | | AAC | |
| 228 | sgRNA | GGUACAUCCAAC | 921 |
| 230 | sgRNA | CGUACGUGGAUUGAAAC | 922 |
| 231 | crRNA | GCUGCACUGCACCGCCCAUUGAUGGUGUGCUCU | 923 |
| | | AGG | |
| 232 | crRNA | AUUGUAGGCGACCUUUUUUUGCGAUGUAGUUCG | 924 |
| | | AGG | |
| 232 | sgRNA | AUGUAGUUCGAGG | 925 |
| 233 | crRNA | AGUGUAUGAUUACCUGUAGUAUGAGGUACAUCC | 926 |
| | | AAC | |
| 239 | sgRNA | GCUGCAAGAGCUCCUAAUUUGAGGGGUGCAUAC | 927 |
| | | AGG | |
| 240 | crRNA | GAUAGUUUUAACUUCCAUUUGAAAUGUAAAUG | 928 |
| | | CAAC | |
| 240 | sgRNA | AUGUAAAUGCAAC | 929 |

[0629] In some instances, a guide nucleic acid can comprise a nucleotide sequence as shown in TABLE 40. In some instances, a sgRNA comprises a repeat sequence as shown in TABLE 40. In some instances, a guide nucleic acid comprises a sequence that is at least 70%, at least 75%, at least 80%, at least 85%, at least 90%, or at least 95% identical to a sequence in TABLE 40. In some instances, a guide nucleic acid comprises a sequence that is at least 70%, at least 75%, at least 80%, at least 85%, at least 90%, or at least 95% identical to any one of SEQ ID Nos: 645, 932, 857, 933, 934, 935, 936, 737, 747, 750, 761, 763, 765, 769, 773, 780, 782, 785 or 941. In some instances, a sgRNA comprises a sequence that is at least 70%, at least 75%, at least 80%, at least 85%, at least 90%, or at least 95% identical to any one of SEQ ID Nos: 645, 932, 857, 933, 934, 935, 936, 737, 747, 750, 761, 763, 765, 769, 773, 780, 782, 785 or 941. In some instances, guide nucleic acids comprise at least 8, at least 9, at least 10, at least 11, at least 12, at least 13, at least 14, at least 15, at least 16, at least 17, at least 18, at least 19, at least 20 at least 25, at least 30, or at least 35 contiguous nucleotides of a nucleotide sequence in TABLE 40.

TABLE 40
Examples Of sgRNA Sequences

| | SEQ ID |
|---|---|
| sgRNA sequence | NO |
| UGGGGCAGUUGGUUGCCCUUAGCCUGAGGCAUUUAUUGCACUCGGGAAG | 645 |
| UACCAUUUCUCAGAAAUGGUACAUCCAAC | |
| UGGGGCAGUUGGUUGCCCUUAGCCUGAGGCAUUUAUUGCACUCGGGAAG | 932 |
| UACCAUUUCUCAGAAAUGGUAUAUCCAAC | |
| UGGGGCAGUUGGUUGCCCUUAGCCUGAGGCAUUUAUUGCACUCGGGAAG | 857 |
| UACCAUUACAUCCAAC | |
| AUGGGGCAGUUGGUUGCCCUUAGCCUGAGGCAUUUAAUGCACUCGGGAG | 933 |
| AAAAAC | |
| AUGGGGCAGUUGGUUGCCCUUAGCCUGAGGCAUUUAAUGCACUCGGGAA | 934 |
| GUACCGAAAAUCCAAC | |
| AUGGGGCAGUUGGUUGCCCUUAGCCUGAGGCAUUUAAUGCACUCGGGAA | 935 |
| GUACCUUUUCUCAGAAAAGGUACAUCCAAC | |
| AUGGGGCAGUUGGUUGCCCUUAGCCUGAGGCAUUUAAUGCACUCGGGAA | 936 |
| GUACCUUUUCUCAGAAACCAAC | |
| AAUAGGAUUUAUCCUAUGGGGCAGUUGGUUGCCCUUAGCCUGAGGCAUU | 737 |
| UAUUGCACUCGGGAAGUACCUUAUUUCAUUGAGCAACAGAAAGGGUACA | |
| UCCAAC | |
| GGGGCAGUUGGAUGCCCUUAUGCUGAGGGAUUAUUCCACUCGGCAAGUA | 747 |
| CCAAUAAUAAUGGAUGUGAAAAGGUACAUCCAAC | |
| CGGGUGGUUGCACAUCCGAAGGGUGAGGAUUUAUUCACUCACUAAUACU | 750 |
| ACAAAUGGAAAAAUUUAAAGGAAAAUGUAAAUGCAAC | |
| UGAAAUAUUGAUUGAGGUCGCCGUUUACGUUGCGUCACAAGGGCGCGCG | 761 |
| GGCGACCGAAGGCCGAUCUGUACGGCCUGCAGGUUGAGAAGGCACAUAU | |
| UAGAGGAAAAUUGCUUCCCUUUGUGUUCGCUCACCGAGUAUUCCUUGUU | |
| AUUUGCGGCAAGAAACUGUCUUAAUUGUUUGAAAGGGUGCAUACAGG | |
| AAGCAACCGCGUACACGCGGACGAACGGCCGACCUGCUCGGCCUGAAGGU | 763 |
| UGAGAAGGUUAUGUAUAAGAGGAGAAAAUCCCCCUUCAUAAUCGCUCAC | |
| CAAGCUCCCAAUUUACAUAUUUUGAAAGGGCGCAUGCAGG | |
| UAUUGCGCUAGCCAUAAUGGCAAUCGCGUACAGGCAACUGAAGGCCGACC | 765 |
| UGUACGGCCUUAAGGUUGAGAAGGCACAUGUAAGUGGAAAAAUGCUUUC | |
| CCGUUGUGUUCGCUCACCAAGCACACACGUUUGAAAUGUGGGGUGCUUAC | |
| AGG | |
| AGUAUGAGGCCGCCGAUAAACGUUUCGCUAGCCUGACAGGCAAUCGCGAA | 769 |
| CGGGCGGCUGAAGGCCGACCUGUACGGCCUGAAGGAUGAGAAGGCACAU | |
| AUAAGUGGAAAAUUGCUUCCCGUUGUGUUCGCUCACCAGGUACUCCUUA | |
| AUUUGAAAGCUGCAAGAGCUCCUAAUUUGAGGGGUGCAUACAGG | |
| AACUGCCGGUAAGAUUACGAUAGCCGAAAGGCAAUUGCGUAUGCGGCAG | 773 |
| UUAAGGCCGGCUCGAACGGCCUGAAGGUUGAGUUUAAAGUCACAUAUAA | |
| GCGGAAAAAUCAGAUUUCCCAUUGUGUUCGCUCACCAAUACGCGCAAAUU | |
| UGAAAAUGUAGUUCGAGG | |
| ACCGAGGCCGCGAAAAACACAACGCUAGCCGAAAGGCAAUCGCGGGUGCG | 780 |
| CGGCCGAAGGCCGACUAGAGCGGCCUGAAGGUUGAGAAGCGUGCAUGUA | |
| AACGGCAGAAAAAAUGCCUUUUGUACGCGCUCACCGAACACGUCUGAGCG | |
| GUUUGAAAGGUGUGCUCUAGG | |
| GGGGUUGUUGGAAACCCUUAUGCUGAGGGAUUAUUCCACUCGGUAAGUA | 782 |
| CCUUAAAUAGUUAUAGAAAGAUGUAAAUCAUCUAUAAAAGAAAGGUACA | |
| UCCAAC | |
| AAGAUAUGAAUAGGAGUAUUCCUAUGGGGCAGUUGGUUGCCCUUAGCCU | 785 |
| GAGGUAUUUAAUGCACUCGGGAAGUACUUUCAACAGUAUCCGUUAGAAA | |
| AGGUACAUCCAAC | |
| AUGAAUAGGAUUCGUCCUAUGGGGCAGUUGGUUGCCCUUAGCCUGAGGC | 941 |
| AUUUAUUGCACUCGGGAAGUACCAUUUCUCAGAAAUGGUACAUCCAAC | |

[0630] In some embodiments, a guide nucleic acid can comprise a nucleotide sequence that is shared among the exemplary guide nucleic acids described herein. For example, in some embodiments, a guide nucleic acid comprises a repeat sequence having the nucleotide sequence UGGUACAUCC (SEQ ID NO: 942). In some embodiments, a guide nucleic acid comprises a repeat sequence that is at least 70%, at least 75%, at least 80%, at least 85%, at least 90%, or at least 95% identical to UGGUACAUCC (SEQ ID NO: 942). Such a repeat sequence includes, for example, the nucleotide sequence of UGGUAUAUCC (SEQ ID NO: 943).

[0631] In some instances, compositions disclosed herein comprises an effector protein comprising an amino acid sequence that is at least 70%, at least 75%, at least 80%, at least 85%, at least 90%, at least 95%, at least 99%, or 100% identical to any one of SEQ ID NOs: 1-13; a crRNA comprising a nucleobase sequence that is at least 70%, at least 75%, at least 80%, at least 85%, at least 90%, at least 95%, or 100% identical to SEQ ID NO: 46; and a tracrRNA comprising a nucleobase sequence that is at least 70%, at least 75%, at least 80%, at least 85%, at least 90%, at least 95%, or 100% identical to SEQ ID NO: 91. In some instances, effector protein comprises an amino acid sequence that is at least 70%, at least 75%, at least 80%, at least 85%, at least 90%, at least 95%, at least 99%, or 100% identical to SEQ ID NO: 1. In some instances, the amino acid sequence of the effector protein is at least 70%, at least 75%, at least 80%, at least 85%, at least 90%, at least 95%, at least 99%, or 100% identical to SEQ ID NO: 1. In some instances, the crRNA and tracrRNA are linked as a sgRNA.

[0632] In some instances, compositions disclosed herein comprises an effector protein comprising an amino acid sequence that is at least 70%, at least 75%, at least 80%, at least 85%, at least 90%, at least 95%, at least 99%, or 100% identical to any one of SEQ ID NOs: 1-13; a crRNA comprising a nucleobase sequence that is at least 70%, at least 75%, at least 80%, at least 85%, at least 90%, at least 95%, or 100% identical to SEQ ID NO: 47; and a tracrRNA comprising a nucleobase sequence that is at least 70%, at least 75%, at least 80%, at least 85%, at least 90%, at least 95%, or 100% identical to SEQ ID NO: 92. In some instances, effector protein comprises an amino acid sequence that is at least 70%, at least 75%, at least 80%, at least 85%, at least 90%, at least 95%, at least 99%, or 100% identical to SEQ ID NO: 2. In some instances, the amino acid sequence of the effector protein is at least 70%, at least 75%, at least 80%, at least 85%, at least 90%, at least 95%, at least 99%, or 100% identical to SEQ ID NO: 2. In some instances, the crRNA and tracrRNA are linked as a sgRNA.

[0633] In some instances, compositions disclosed herein comprises an effector protein comprising an amino acid sequence that is at least 70%, at least 75%, at least 80%, at least 85%, at least 90%, at least 95%, at least 99%, or 100% identical to any one of SEQ ID NOs: 1-13; a crRNA comprising a nucleobase sequence that is at least 70%, at least 75%, at least 80%, at least 85%, at least 90%, at least 95%, or 100% identical to SEQ ID NO: 48; and a tracrRNA comprising a nucleobase sequence that is at least 70%, at least 75%, at least 80%, at least 85%, at least 90%, at least 95%, or 100% identical to SEQ ID NO: 93. In some instances, effector protein comprises an amino acid sequence that is at least 70%, at least 75%, at least 80%, at least 85%, at least 90%, at least 95%, at least 99%, or 100% identical to SEQ ID NO: 3. In some instances, the amino acid sequence of the effector protein is at least 70%, at least 75%, at least 80%, at least 85%, at least 90%, at least 95%, at least 99%, or 100% identical to SEQ ID NO: 3. In some instances, the crRNA and tracrRNA are linked as a sgRNA.

[0634] In some instances, compositions disclosed herein comprises an effector protein comprising an amino acid sequence that is at least 70%, at least 75%, at least 80%, at least 85%, at least 90%, at least 95%, at least 99%, or 100% identical to any one of SEQ ID NOs: 1-13; a crRNA comprising a nucleobase sequence that is at least 70%, at least 75%, at least 80%, at least 85%, at least 90%, at least 95%, or 100% identical to SEQ ID NO: 49; and a tracrRNA comprising a nucleobase sequence that is at least 70%, at least 75%, at least 80%, at least 85%, at least 90%, at least 95%, or 100% identical to SEQ ID NO: 94. In some instances, effector protein comprises an amino acid sequence that is at least 70%, at least 75%, at least 80%, at least 85%, at least 90%, at least 95%, at least 99%, or 100% identical to SEQ ID NO: 4. In some instances, the amino acid sequence of the effector protein is at least 70%, at least 75%, at least 80%, at least 85%, at least 90%, at least 95%, at least 99%, or 100% identical to SEQ ID NO: 4. In some instances, the crRNA and tracrRNA are linked as a sgRNA.

[0635] In some instances, compositions disclosed herein comprises an effector protein comprising an amino acid sequence that is at least 70%, at least 75%, at least 80%, at least 85%, at least 90%, at least 95%, at least 99%, or 100% identical to any one of SEQ ID NOs: 1-13; a crRNA comprising a nucleobase sequence that is at least 70%, at least 75%, at least 80%, at least 85%, at least 90%, at least 95%, or 100% identical to SEQ ID NO: 50; and a tracrRNA comprising a nucleobase sequence that is at least 70%, at least 75%, at least 80%, at least 85%, at least 90%, at least 95%, or 100% identical to SEQ ID NO: 95. In some instances, effector protein comprises an amino acid sequence that is at least 70%, at least 75%, at least 80%, at least 85%, at least 90%, at least 95%, at least 99%, or 100% identical to SEQ ID NO: 5. In some instances, the amino acid sequence of the effector protein is at least 70%, at least 75%, at least 80%, at least 85%, at least 90%, at least 95%, at least 99%, or 100% identical to SEQ ID NO: 5. In some instances, the crRNA and tracrRNA are linked as a sgRNA.

[0636] In some instances, compositions disclosed herein comprises an effector protein comprising an amino acid sequence that is at least 70%, at least 75%, at least 80%, at least 85%, at least 90%, at least 95%, at least 99%, or 100% identical to any one of SEQ ID NOs: 1-13; a crRNA comprising a nucleobase sequence that is at least 70%, at least 75%, at least 80%, at least 85%, at least 90%, at least 95%, or 100% identical to SEQ ID NO: 51; and a tracrRNA comprising a nucleobase sequence that is at least 70%, at least 75%, at least 80%, at least 85%, at least 90%, at least 95%, or 100% identical to SEQ ID NO: 96. In some instances, effector protein comprises an amino acid sequence that is at least 70%, at least 75%, at least 80%, at least 85%, at least 90%, at least 95%, at least 99%, or 100% identical to SEQ ID NO: 6. In some instances, the amino acid sequence of the effector protein is at least 70%, at least 75%, at least 80%, at least 85%, at least 90%, at least 95%, at least 99%, or 100% identical to SEQ ID NO: 6. In some instances, the crRNA and tracrRNA are linked as a sgRNA.

[0637] In some instances, compositions disclosed herein comprises an effector protein comprising an amino acid sequence that is at least 70%, at least 75%, at least 80%, at least 85%, at least 90%, at least 95%, at least 99%, or 100% identical to any one of SEQ ID NOs: 1-13; a crRNA comprising a nucleobase sequence that is at least 70%, at least 75%, at least 80%, at least 85%, at least 90%, at least 95%, or 100% identical to SEQ ID NO: 52; and a tracrRNA comprising a nucleobase sequence that is at least 70%, at least 75%, at least 80%, at least 85%, at least 90%, at least 95%, or 100% identical to SEQ ID NO: 97. In some instances, effector protein comprises an amino acid sequence that is at least 70%, at least 75%, at least 80%, at least 85%, at least 90%, at least 95%, at least 99%, or 100% identical to SEQ ID NO: 7. In some instances, the amino acid sequence of the effector protein is at least 70%, at least 75%, at least 80%, at least 85%, at least 90%, at least 95%, at least 99%, or 100% identical to SEQ ID NO: 7. In some instances, the crRNA and tracrRNA are linked as a sgRNA.

[0638] In some instances, compositions disclosed herein comprises an effector protein comprising an amino acid sequence that is at least 70%, at least 75%, at least 80%, at least 85%, at least 90%, at least 95%, at least 99%, or 100% identical to any one of SEQ ID NOs: 1-13; a crRNA comprising a nucleobase sequence that is at least 70%, at least 75%, at least 80%, at least 85%, at least 90%, at least 95%, or 100% identical to SEQ ID NO: 53; and a tracrRNA comprising a nucleobase sequence that is at least 70%, at least 75%, at least 80%, at least 85%, at least 90%, at least 95%, or 100% identical to SEQ ID NO: 98. In some instances, effector protein comprises an amino acid sequence that is at least 70%, at least 75%, at least 80%, at least 85%, at least 90%, at least 95%, at least 99%, or 100% identical to SEQ ID NO: 8. In some instances, the amino acid sequence of the effector protein is at least 70%, at least 75%, at least 80%, at least 85%, at least 90%, at least 95%, at least 99%, or 100% identical to SEQ ID NO: 8. In some instances, the crRNA and tracrRNA are linked as a sgRNA.

[0639] In some instances, compositions disclosed herein comprises an effector protein comprising an amino acid sequence that is at least 70%, at least 75%, at least 80%, at least 85%, at least 90%, at least 95%, at least 99%, or 100% identical to any one of SEQ ID NOs: 1-13; a crRNA comprising a nucleobase sequence that is at least 70%, at least 75%, at least 80%, at least 85%, at least 90%, at least 95%, or 100% identical to SEQ ID NO: 54; and a tracrRNA comprising a nucleobase sequence that is at least 70%, at least 75%, at least 80%, at least 85%, at least 90%, at least 95%, or 100% identical to SEQ ID NO: 99. In some instances, effector protein comprises an amino acid sequence that is at least 70%, at least 75%, at least 80%, at least 85%, at least 90%, at least 95%, at least 99%, or 100% identical to SEQ ID NO: 9. In some instances, the amino acid sequence of the effector protein is at least 70%, at least 75%, at least 80%, at least 85%, at least 90%, at least 95%, at least 99%, or 100% identical to SEQ ID NO: 9. In some instances, the crRNA and tracrRNA are linked as a sgRNA.

[0640] In some instances, compositions disclosed herein comprises an effector protein comprising an amino acid sequence that is at least 70%, at least 75%, at least 80%, at least 85%, at least 90%, at least 95%, at least 99%, or 100% identical to any one of SEQ ID NOs: 1-13; a crRNA comprising a nucleobase sequence that is at least 70%, at least 75%, at least 80%, at least 85%, at least 90%, at least 95%, or 100% identical to SEQ ID NO: 55; and a tracrRNA comprising a nucleobase sequence that is at least 70%, at least 75%, at least 80%, at least 85%, at least 90%, at least 95%, or 100% identical to SEQ ID NO: 100. In some instances, effector protein comprises an amino acid sequence that is at least 70%, at least 75%, at least 80%, at least 85%, at least 90%, at least 95%, at least 99%, or 100% identical to SEQ ID NO: 10. In some instances, the amino acid sequence of the effector protein is at least 70%, at least 75%, at least 80%, at least 85%, at least 90%, at least 95%, at least 99%, or 100% identical to SEQ ID NO: 10. In some instances, the crRNA and tracrRNA are linked as a sgRNA.

[0641] In some instances, compositions disclosed herein comprises an effector protein comprising an amino acid sequence that is at least 70%, at least 75%, at least 80%, at least 85%, at least 90%, at least 95%, at least 99%, or 100% identical to any one of SEQ ID NOs: 1-13; a crRNA comprising a nucleobase sequence that is at least 70%, at least 75%, at least 80%, at least 85%, at least 90%, at least 95%, or 100% identical to SEQ ID NO: 56; and a tracrRNA comprising a nucleobase sequence that is at least 70%, at least 75%, at least 80%, at least 85%, at least 90%, at least 95%, or 100% identical to SEQ ID NO: 101. In some instances, effector protein comprises an amino acid sequence that is at least 70%, at least 75%, at least 80%, at least 85%, at least 90%, at least 95%, at least 99%, or 100% identical to SEQ ID NO: 11. In some instances, the amino acid sequence of the effector protein is at least 70%, at least 75%, at least 80%, at least 85%, at least 90%, at least 95%, at least 99%, or 100% identical to SEQ ID NO: 11. In some instances, the crRNA and tracrRNA are linked as a sgRNA.

[0642] In some instances, compositions disclosed herein comprises an effector protein comprising an amino acid sequence that is at least 70%, at least 75%, at least 80%, at least 85%, at least 90%, at least 95%, at least 99%, or 100% identical to any one of SEQ ID NOs: 1-13; a crRNA comprising a nucleobase sequence that is at least 70%, at least 75%, at least 80%, at least 85%, at least 90%, at least 95%, or 100% identical to SEQ ID NO: 57; and a tracrRNA comprising a nucleobase sequence that is at least 70%, at least 75%, at least 80%, at least 85%, at least 90%, at least 95%, or 100% identical to SEQ ID NO: 102. In some instances, effector protein comprises an amino acid sequence that is at least 70%, at least 75%, at least 80%, at least 85%, at least 90%, at least 95%, at least 99%, or 100% identical to SEQ ID NO: 12. In some instances, the amino acid sequence of the effector protein is at least 70%, at least 75%, at least 80%, at least 85%, at least 90%, at least 95%, at least 99%, or 100% identical to SEQ ID NO: 12. In some instances, the crRNA and tracrRNA are linked as a sgRNA.

[0643] In some instances, compositions disclosed herein comprises an effector protein comprising an amino acid sequence that is at least 70%, at least 75%, at least 80%, at least 85%, at least 90%, at least 95%, at least 99%, or 100% identical to any one of SEQ ID NOs: 1-13; a crRNA comprising a nucleobase sequence that is at least 70%, at least 75%, at least 80%, at least 85%, at least 90%, at least 95%, or 100% identical to SEQ ID NO: 58; and a tracrRNA comprising a nucleobase sequence that is at least 70%, at least 75%, at least 80%, at least 85%, at least 90%, at least 95%, or 100% identical to SEQ ID NO: 103. In some instances, effector protein comprises an amino acid sequence that is at least 70%, at least 75%, at least 80%, at least 85%, at least 90%, at least 95%, at least 99%, or 100% identical to SEQ ID NO: 13. In some instances, the amino acid sequence of the effector protein is at least 70%, at least 75%, at least 80%, at least 85%, at least 90%, at least 95%, at least 99%, or 100% identical to SEQ ID NO: 13. In some instances, the crRNA and tracrRNA are linked as a sgRNA.

[0644] In some instances, compositions disclosed herein comprises an effector protein comprising an amino acid sequence that is at least 70%, at least 75%, at least 80%, at least 85%, at least 90%, at least 95%, at least 99%, or 100% identical to any one of SEQ ID NOs: 14-21; a crRNA comprising a nucleobase sequence that is at least 70%, at least 75%, at least 80%, at least 85%, at least 90%, at least 95%, or 100% identical to SEQ ID NO: 59; and a tracrRNA comprising a nucleobase sequence that is at least 70%, at least 75%, at least 80%, at least 85%, at least 90%, at least 95%, or 100% identical to SEQ ID NO: 104. In some instances, effector protein comprises an amino acid sequence that is at least 70%, at least 75%, at least 80%, at least 85%, at least 90%, at least 95%, at least 99%, or 100% identical to SEQ ID NO: 14. In some instances, the amino acid sequence of the effector protein is at least 70%, at least 75%, at least 80%, at least 85%, at least 90%, at least 95%, at least 99%, or 100% identical to SEQ ID NO: 14. In some instances, the crRNA and tracrRNA are linked as a sgRNA.

[0645] In some instances, compositions disclosed herein comprises an effector protein comprising an amino acid sequence that is at least 70%, at least 75%, at least 80%, at least 85%, at least 90%, at least 95%, at least 99%, or 100% identical to any one of SEQ ID NOs: 14-21; a crRNA comprising a nucleobase sequence that is at least 70%, at least 75%, at least 80%, at least 85%, at least 90%, at least 95%, or 100% identical to SEQ ID NO: 59; and a tracrRNA comprising a nucleobase sequence that is at least 70%, at least 75%, at least 80%, at least 85%, at least 90%, at least 95%, or 100% identical to SEQ ID NO: 105. In some instances, effector protein comprises an amino acid sequence that is at least 70%, at least 75%, at least 80%, at least 85%, at least 90%, at least 95%, at least 99%, or 100% identical to SEQ ID NO: 14. In some instances, the amino acid sequence of the effector protein is at least 70%, at least 75%, at least 80%, at least 85%, at least 90%, at least 95%, at least 99%, or 100% identical to SEQ ID NO: 14. In some instances, the crRNA and tracrRNA are linked as a sgRNA.

[0646] In some instances, compositions disclosed herein comprises an effector protein comprising an amino acid sequence that is at least 70%, at least 75%, at least 80%, at least 85%, at least 90%, at least 95%, at least 99%, or 100% identical to any one of SEQ ID NOs: 14-21; a crRNA comprising a nucleobase sequence that is at least 70%, at least 75%, at least 80%, at least 85%, at least 90%, at least 95%, or 100% identical to SEQ ID NO: 60; and a tracrRNA comprising a nucleobase sequence that is at least 70%, at least 75%, at least 80%, at least 85%, at least 90%, at least 95%, or 100% identical to SEQ ID NO: 106. In some instances, effector protein comprises an amino acid sequence that is at least 70%, at least 75%, at least 80%, at least 85%, at least 90%, at least 95%, at least 99%, or 100% identical to SEQ ID NO: 15. In some instances, the amino acid sequence of the effector protein is at least 70%, at least 75%, at least 80%, at least 85%, at least 90%, at least 95%, at least 99%, or 100% identical to SEQ ID NO: 15. In some instances, the crRNA and tracrRNA are linked as a sgRNA.

[0647] In some instances, compositions disclosed herein comprises an effector protein comprising an amino acid sequence that is at least 70%, at least 75%, at least 80%, at least 85%, at least 90%, at least 95%, at least 99%, or 100% identical to any one of SEQ ID NOs: 14-21; a crRNA comprising a nucleobase sequence that is at least 70%, at least 75%, at least 80%, at least 85%, at least 90%, at least 95%, or 100% identical to SEQ ID NO: 60; and a tracrRNA comprising a nucleobase sequence that is at least 70%, at least 75%, at least 80%, at least 85%, at least 90%, at least 95%, or 100% identical to SEQ ID NO: 107. In some instances, effector protein comprises an amino acid sequence that is at least 70%, at least 75%, at least 80%, at least 85%, at least 90%, at least 95%, at least 99%, or 100% identical to SEQ ID NO: 15. In some instances, the amino acid sequence of the effector protein is at least 70%, at least 75%, at least 80%, at least 85%, at least 90%, at least 95%, at least 99%, or 100% identical to SEQ ID NO: 15. In some instances, the crRNA and tracrRNA are linked as a sgRNA.

[0648] In some instances, compositions disclosed herein comprises an effector protein comprising an amino acid sequence that is at least 70%, at least 75%, at least 80%, at least 85%, at least 90%, at least 95%, at least 99%, or 100% identical to any one of SEQ ID NOs: 14-21; a crRNA comprising a nucleobase sequence that is at least 70%, at least 75%, at least 80%, at least 85%, at least 90%, at least 95%, or 100% identical to SEQ ID NO: 61; and a tracrRNA comprising a nucleobase sequence that is at least 70%, at least 75%, at least 80%, at least 85%, at least 90%, at least 95%, or 100% identical to SEQ ID NO: 108. In some instances, effector protein comprises an amino acid sequence that is at least 70%, at least 75%, at least 80%, at least 85%, at least 90%, at least 95%, at least 99%, or 100% identical to SEQ ID NO: 16. In some instances, the amino acid sequence of the effector protein is at least 70%, at least 75%, at least 80%, at least 85%, at least 90%, at least 95%, at least 99%, or 100% identical to SEQ ID NO: 16. In some instances, the crRNA and tracrRNA are linked as a sgRNA.

[0649] In some instances, compositions disclosed herein comprises an effector protein comprising an amino acid sequence that is at least 70%, at least 75%, at least 80%, at least 85%, at least 90%, at least 95%, at least 99%, or 100% identical to any one of SEQ ID NOs: 14-21; a crRNA comprising a nucleobase sequence that is at least 70%, at least 75%, at least 80%, at least 85%, at least 90%, at least 95%, or 100% identical to SEQ ID NO: 61; and a tracrRNA comprising a nucleobase sequence that is at least 70%, at least 75%, at least 80%, at least 85%, at least 90%, at least 95%, or 100% identical to SEQ ID NO: 109. In some instances, effector protein comprises an amino acid sequence that is at least 70%, at least 75%, at least 80%, at least 85%, at least 90%, at least 95%, at least 99%, or 100% identical to SEQ ID NO: 16. In some instances, the amino acid sequence of the effector protein is at least 70%, at least 75%, at least 80%, at least 85%, at least 90%, at least 95%, at least 99%, or 100% identical to SEQ ID NO: 16. In some instances, the crRNA and tracrRNA are linked as a sgRNA.

[0650] In some instances, compositions disclosed herein comprises an effector protein comprising an amino acid sequence that is at least 70%, at least 75%, at least 80%, at least 85%, at least 90%, at least 95%, at least 99%, or 100% identical to any one of SEQ ID NOs: 14-21; a crRNA comprising a nucleobase sequence that is at least 70%, at least 75%, at least 80%, at least 85%, at least 90%, at least 95%, or 100% identical to SEQ ID NO: 62; and a tracrRNA comprising a nucleobase sequence that is at least 70%, at least 75%, at least 80%, at least 85%, at least 90%, at least 95%, or 100% identical to SEQ ID NO: 110. In some instances, effector protein comprises an amino acid sequence that is at least 70%, at least 75%, at least 80%, at least 85%, at least 90%, at least 95%, at least 99%, or 100% identical to SEQ ID NO: 17. In some instances, the amino acid sequence of the effector protein is at least 70%, at least 75%, at least 80%, at least 85%, at least 90%, at least 95%, at least 99%, or 100% identical to SEQ ID NO: 17. In some instances, the crRNA and tracrRNA are linked as a sgRNA.

[0651] In some instances, compositions disclosed herein comprises an effector protein comprising an amino acid sequence that is at least 70%, at least 75%, at least 80%, at least 85%, at least 90%, at least 95%, at least 99%, or 100% identical to any one of SEQ ID NOs: 14-21; a crRNA comprising a nucleobase sequence that is at least 70%, at least 75%, at least 80%, at least 85%, at least 90%, at least 95%, or 100% identical to SEQ ID NO: 62; and a tracrRNA comprising a nucleobase sequence that is at least 70%, at least 75%, at least 80%, at least 85%, at least 90%, at least 95%, or 100% identical to SEQ ID NO: 111. In some instances, effector protein comprises an amino acid sequence that is at least 70%, at least 75%, at least 80%, at least 85%, at least 90%, at least 95%, at least 99%, or 100% identical to SEQ ID NO: 17. In some instances, the amino acid sequence of the effector protein is at least 70%, at least 75%, at least 80%, at least 85%, at least 90%, at least 95%, at least 99%, or 100% identical to SEQ ID NO: 17. In some instances, the crRNA and tracrRNA are linked as a sgRNA.

[0652] In some instances, compositions disclosed herein comprises an effector protein comprising an amino acid sequence that is at least 70%, at least 75%, at least 80%, at least 85%, at least 90%, at least 95%, at least 99%, or 100% identical to any one of SEQ ID NOs: 14-21; a crRNA comprising a nucleobase sequence that is at least 70%, at least 75%, at least 80%, at least 85%, at least 90%, at least 95%, or 100% identical to SEQ ID NO: 63; and a tracrRNA comprising a nucleobase sequence that is at least 70%, at least 75%, at least 80%, at least 85%, at least 90%, at least 95%, or 100% identical to SEQ ID NO: 112. In some instances, effector protein comprises an amino acid sequence that is at least 70%, at least 75%, at least 80%, at least 85%, at least 90%, at least 95%, at least 99%, or 100% identical to SEQ ID NO: 18. In some instances, the amino acid sequence of the effector protein is at least 70%, at least 75%, at least 80%, at least 85%, at least 90%, at least 95%, at least 99%, or 100% identical to SEQ ID NO: 18. In some instances, the crRNA and tracrRNA are linked as a sgRNA.

[0653] In some instances, compositions disclosed herein comprises an effector protein comprising an amino acid sequence that is at least 70%, at least 75%, at least 80%, at least 85%, at least 90%, at least 95%, at least 99%, or 100% identical to any one of SEQ ID NOs: 14-21; a crRNA comprising a nucleobase sequence that is at least 70%, at least 75%, at least 80%, at least 85%, at least 90%, at least 95%, or 100% identical to SEQ ID NO: 63; and a tracrRNA comprising a nucleobase sequence that is at least 70%, at least 75%, at least 80%, at least 85%, at least 90%, at least 95%, or 100% identical to SEQ ID NO: 113. In some instances, effector protein comprises an amino acid sequence that is at least 70%, at least 75%, at least 80%, at least 85%, at least 90%, at least 95%, at least 99%, or 100% identical to SEQ ID NO: 18. In some instances, the amino acid sequence of the effector protein is at least 70%, at least 75%, at least 80%, at least 85%, at least 90%, at least 95%, at least 99%, or 100% identical to SEQ ID NO: 18. In some instances, the crRNA and tracrRNA are linked as a sgRNA.

[0654] In some instances, compositions disclosed herein comprises an effector protein comprising an amino acid sequence that is at least 70%, at least 75%, at least 80%, at least 85%, at least 90%, at least 95%, at least 99%, or 100% identical to any one of SEQ ID NOs: 14-21; a crRNA comprising a nucleobase sequence that is at least 70%, at least 75%, at least 80%, at least 85%, at least 90%, at least 95%, or 100% identical to SEQ ID NO: 64; and a tracrRNA comprising a nucleobase sequence that is at least 70%, at least 75%, at least 80%, at least 85%, at least 90%, at least 95%, or 100% identical to SEQ ID NO: 114. In some instances, effector protein comprises an amino acid sequence that is at least 70%, at least 75%, at least 80%, at least 85%, at least 90%, at least 95%, at least 99%, or 100% identical to SEQ ID NO: 19. In some instances, the amino acid sequence of the effector protein is at least 70%, at least 75%, at least 80%, at least 85%, at least 90%, at least 95%, at least 99%, or 100% identical to SEQ ID NO: 19. In some instances, the crRNA and tracrRNA are linked as a sgRNA.

[0655] In some instances, compositions disclosed herein comprises an effector protein comprising an amino acid sequence that is at least 70%, at least 75%, at least 80%, at least 85%, at least 90%, at least 95%, at least 99%, or 100% identical to any one of SEQ ID NOs: 14-21; a crRNA comprising a nucleobase sequence that is at least 70%, at least 75%, at least 80%, at least 85%, at least 90%, at least 95%, or 100% identical to SEQ ID NO: 64; and a tracrRNA comprising a nucleobase sequence that is at least 70%, at least 75%, at least 80%, at least 85%, at least 90%, at least 95%, or 100% identical to SEQ ID NO: 115. In some instances, effector protein comprises an amino acid sequence that is at least 70%, at least 75%, at least 80%, at least 85%, at least 90%, at least 95%, at least 99%, or 100% identical to SEQ ID NO: 19. In some instances, the amino acid sequence of the effector protein is at least 70%, at least 75%, at least 80%, at least 85%, at least 90%, at least 95%, at least 99%, or 100% identical to SEQ ID NO: 19. In some instances, the crRNA and tracrRNA are linked as a sgRNA.

[0656] In some instances, compositions disclosed herein comprises an effector protein comprising an amino acid sequence that is at least 70%, at least 75%, at least 80%, at least 85%, at least 90%, at least 95%, at least 99%, or 100% identical to any one of SEQ ID NOs: 14-21; a crRNA comprising a nucleobase sequence that is at least 70%, at least 75%, at least 80%, at least 85%, at least 90%, at least 95%, or 100% identical to SEQ ID NO: 65; and a tracrRNA comprising a nucleobase sequence that is at least 70%, at least 75%, at least 80%, at least 85%, at least 90%, at least 95%, or 100% identical to SEQ ID NO: 116. In some instances, effector protein comprises an amino acid sequence that is at least 70%, at least 75%, at least 80%, at least 85%, at least 90%, at least 95%, at least 99%, or 100% identical to SEQ ID NO: 20. In some instances, the amino acid sequence of the effector protein is at least 70%, at least 75%, at least 80%, at least 85%, at least 90%, at least 95%, at least 99%, or 100% identical to SEQ ID NO: 20. In some instances, the crRNA and tracrRNA are linked as a sgRNA.

[0657] In some instances, compositions disclosed herein comprises an effector protein comprising an amino acid sequence that is at least 70%, at least 75%, at least 80%, at least 85%, at least 90%, at least 95%, at least 99%, or 100% identical to any one of SEQ ID NOs: 14-21; a crRNA comprising a nucleobase sequence that is at least 70%, at least 75%, at least 80%, at least 85%, at least 90%, at least 95%, or 100% identical to SEQ ID NO: 65; and a tracrRNA comprising a nucleobase sequence that is at least 70%, at least 75%, at least 80%, at least 85%, at least 90%, at least 95%, or 100% identical to SEQ ID NO: 117. In some instances, effector protein comprises an amino acid sequence that is at least 70%, at least 75%, at least 80%, at least 85%, at least 90%, at least 95%, at least 99%, or 100% identical to SEQ ID NO: 20. In some instances, the amino acid sequence of the effector protein is at least 70%, at least 75%, at least 80%, at least 85%, at least 90%, at least 95%, at least 99%, or 100% identical to SEQ ID NO: 20. In some instances, the crRNA and tracrRNA are linked as a sgRNA.

[0658] In some instances, compositions disclosed herein comprises an effector protein comprising an amino acid sequence that is at least 70%, at least 75%, at least 80%, at least 85%, at least 90%, at least 95%, at least 99%, or 100% identical to any one of SEQ ID NOs: 14-21; a crRNA comprising a nucleobase sequence that is at least 70%, at least 75%, at least 80%, at least 85%, at least 90%, at least 95%, or 100% identical to SEQ ID NO: 66; and a tracrRNA comprising a nucleobase sequence that is at least 70%, at least 75%, at least 80%, at least 85%, at least 90%, at least 95%, or 100% identical to SEQ ID NO: 118. In some instances, effector protein comprises an amino acid sequence that is at least 70%, at least 75%, at least 80%, at least 85%, at least 90%, at least 95%, at least 99%, or 100% identical to SEQ ID NO: 21. In some instances, the amino acid sequence of the effector protein is at least 70%, at least 75%, at least 80%, at least 85%, at least 90%, at least 95%, at least 99%, or 100% identical to SEQ ID NO: 21. In some instances, the crRNA and tracrRNA are linked as a sgRNA.

[0659] In some instances, compositions disclosed herein comprises an effector protein comprising an amino acid sequence that is at least 70%, at least 75%, at least 80%, at least 85%, at least 90%, at least 95%, at least 99%, or 100% identical to any one of SEQ ID NOs: 14-21; a crRNA comprising a nucleobase sequence that is at least 70%, at least 75%, at least 80%, at least 85%, at least 90%, at least 95%, or 100% identical to SEQ ID NO: 66; and a tracrRNA comprising a nucleobase sequence that is at least 70%, at least 75%, at least 80%, at least 85%, at least 90%, at least 95%, or 100% identical to SEQ ID NO: 119. In some instances, effector protein comprises an amino acid sequence that is at least 70%, at least 75%, at least 80%, at least 85%, at least 90%, at least 95%, at least 99%, or 100% identical to SEQ ID NO: 21. In some instances, the amino acid sequence of the effector protein is at least 70%, at least 75%, at least 80%, at least 85%, at least 90%, at least 95%, at least 99%, or 100% identical to SEQ ID NO: 21. In some instances, the crRNA and tracrRNA are linked as a sgRNA.

[0660] In some instances, compositions disclosed herein comprises an effector protein comprising an amino acid sequence that is at least 70%, at least 75%, at least 80%, at least 85%, at least 90%, at least 95%, at least 99%, or 100% identical to any one of SEQ ID NOs: 22-34; a crRNA comprising a nucleobase sequence that is at least 70%, at least 75%, at least 80%, at least 85%, at least 90%, at least 95%, or 100% identical to SEQ ID NO: 67; and a tracrRNA comprising a nucleobase sequence that is at least 70%, at least 75%, at least 80%, at least 85%, at least 90%, at least 95%, or 100% identical to SEQ ID NO: 120. In some instances, effector protein comprises an amino acid sequence that is at least 70%, at least 75%, at least 80%, at least 85%, at least 90%, at least 95%, at least 99%, or 100% identical to SEQ ID NO: 22. In some instances, the amino acid sequence of the effector protein is at least 70%, at least 75%, at least 80%, at least 85%, at least 90%, at least 95%, at least 99%, or 100% identical to SEQ ID NO: 22. In some instances, the crRNA and tracrRNA are linked as a sgRNA.

[0661] In some instances, compositions disclosed herein comprises an effector protein comprising an amino acid sequence that is at least 70%, at least 75%, at least 80%, at least 85%, at least 90%, at least 95%, at least 99%, or 100% identical to any one of SEQ ID NOs: 22-34; a crRNA comprising a nucleobase sequence that is at least 70%, at least 75%, at least 80%, at least 85%, at least 90%, at least 95%, or 100% identical to SEQ ID NO: 68; and a tracrRNA comprising a nucleobase sequence that is at least 70%, at least 75%, at least 80%, at least 85%, at least 90%, at least 95%, or 100% identical to SEQ ID NO: 120. In some instances, effector protein comprises an amino acid sequence that is at least 70%, at least 75%, at least 80%, at least 85%, at least 90%, at least 95%, at least 99%, or 100% identical to SEQ ID NO: 23. In some instances, the amino acid sequence of the effector protein is at least 70%, at least 75%, at least 80%, at least 85%, at least 90%, at least 95%, at least 99%, or 100% identical to SEQ ID NO: 23. In some instances, the crRNA and tracrRNA are linked as a sgRNA.

[0662] In some instances, compositions disclosed herein comprises an effector protein comprising an amino acid sequence that is at least 70%, at least 75%, at least 80%, at least 85%, at least 90%, at least 95%, at least 99%, or 100% identical to any one of SEQ ID NOs: 22-34; a crRNA comprising a nucleobase sequence that is at least 70%, at least 75%, at least 80%, at least 85%, at least 90%, at least 95%, or 100% identical to SEQ ID NO: 69; and a tracrRNA comprising a nucleobase sequence that is at least 70%, at least 75%, at least 80%, at least 85%, at least 90%, at least 95%, or 100% identical to SEQ ID NO: 121. In some instances, effector protein comprises an amino acid sequence that is at least 70%, at least 75%, at least 80%, at least 85%, at least 90%, at least 95%, at least 99%, or 100% identical to SEQ ID NO: 24. In some instances, the amino acid sequence of the effector protein is at least 70%, at least 75%, at least 80%, at least 85%, at least 90%, at least 95%, at least 99%, or 100% identical to SEQ ID NO: 24. In some instances, the crRNA and tracrRNA are linked as a sgRNA.

[0663] In some instances, compositions disclosed herein comprises an effector protein comprising an amino acid sequence that is at least 70%, at least 75%, at least 80%, at least 85%, at least 90%, at least 95%, at least 99%, or 100% identical to any one of SEQ ID NOs: 22-34; a crRNA comprising a nucleobase sequence that is at least 70%, at least 75%, at least 80%, at least 85%, at least 90%, at least 95%, or 100% identical to SEQ ID NO: 70; and a tracrRNA comprising a nucleobase sequence that is at least 70%, at least 75%, at least 80%, at least 85%, at least 90%, at least 95%, or 100% identical to SEQ ID NO: 122. In some instances, effector protein comprises an amino acid sequence that is at least 70%, at least 75%, at least 80%, at least 85%, at least 90%, at least 95%, at least 99%, or 100% identical to SEQ ID NO: 25. In some instances, the amino acid sequence of the effector protein is at least 70%, at least 75%, at least 80%, at least 85%, at least 90%, at least 95%, at least 99%, or 100% identical to SEQ ID NO: 25. In some instances, the crRNA and tracrRNA are linked as a sgRNA.

[0664] In some instances, compositions disclosed herein comprises an effector protein comprising an amino acid sequence that is at least 70%, at least 75%, at least 80%, at least 85%, at least 90%, at least 95%, at least 99%, or 100% identical to any one of SEQ ID NOs: 22-34; a crRNA comprising a nucleobase sequence that is at least 70%, at least 75%, at least 80%, at least 85%, at least 90%, at least 95%, or 100% identical to SEQ ID NO: 71; and a tracrRNA comprising a nucleobase sequence that is at least 70%, at least 75%, at least 80%, at least 85%, at least 90%, at least 95%, or 100% identical to SEQ ID NO: 120. In some instances, effector protein comprises an amino acid sequence that is at least 70%, at least 75%, at least 80%, at least 85%, at least 90%, at least 95%, at least 99%, or 100% identical to SEQ ID NO: 26. In some instances, the amino acid sequence of the effector protein is at least 70%, at least 75%, at least 80%, at least 85%, at least 90%, at least 95%, at least 99%, or 100% identical to SEQ ID NO: 26. In some instances, the crRNA and tracrRNA are linked as a sgRNA.

[0665] In some instances, compositions disclosed herein comprises an effector protein comprising an amino acid sequence that is at least 70%, at least 75%, at least 80%, at least 85%, at least 90%, at least 95%, at least 99%, or 100% identical to any one of SEQ ID NOs: 22-34; a crRNA comprising a nucleobase sequence that is at least 70%, at least 75%, at least 80%, at least 85%, at least 90%, at least 95%, or 100% identical to SEQ ID NO: 72; and a tracrRNA comprising a nucleobase sequence that is at least 70%, at least 75%, at least 80%, at least 85%, at least 90%, at least 95%, or 100% identical to SEQ ID NO: 123. In some instances, effector protein comprises an amino acid sequence that is at least 70%, at least 75%, at least 80%, at least 85%, at least 90%, at least 95%, at least 99%, or 100% identical to SEQ ID NO: 27. In some instances, the amino acid sequence of the effector protein is at least 70%, at least 75%, at least 80%, at least 85%, at least 90%, at least 95%, at least 99%, or 100% identical to SEQ ID NO: 27. In some instances, the crRNA and tracrRNA are linked as a sgRNA.

[0666] In some instances, compositions disclosed herein comprises an effector protein comprising an amino acid sequence that is at least 70%, at least 75%, at least 80%, at least 85%, at least 90%, at least 95%, at least 99%, or 100% identical to any one of SEQ ID NOs: 22-34; a crRNA comprising a nucleobase sequence that is at least 70%, at least 75%, at least 80%, at least 85%, at least 90%, at least 95%, or 100% identical to SEQ ID NO: 73; and a tracrRNA comprising a nucleobase sequence that is at least 70%, at least 75%, at least 80%, at least 85%, at least 90%, at least 95%, or 100% identical to SEQ ID NO: 121. In some instances, effector protein comprises an amino acid sequence that is at least 70%, at least 75%, at least 80%, at least 85%, at least 90%, at least 95%, at least 99%, or 100% identical to SEQ ID NO: 28. In some instances, the amino acid sequence of the effector protein is at least 70%, at least 75%, at least 80%, at least 85%, at least 90%, at least 95%, at least 99%, or 100% identical to SEQ ID NO: 28. In some instances, the crRNA and tracrRNA are linked as a sgRNA.

[0667] In some instances, compositions disclosed herein comprises an effector protein comprising an amino acid sequence that is at least 70%, at least 75%, at least 80%, at least 85%, at least 90%, at least 95%, at least 99%, or 100% identical to any one of SEQ ID NOs: 22-34; a crRNA comprising a nucleobase sequence that is at least 70%, at least 75%, at least 80%, at least 85%, at least 90%, at least 95%, or 100% identical to SEQ ID NO: 74; and a tracrRNA comprising a nucleobase sequence that is at least 70%, at least 75%, at least 80%, at least 85%, at least 90%, at least 95%, or 100% identical to SEQ ID NO: 121. In some instances, effector protein comprises an amino acid sequence that is at least 70%, at least 75%, at least 80%, at least 85%, at least 90%, at least 95%, at least 99%, or 100% identical to SEQ ID NO: 29. In some instances, the amino acid sequence of the effector protein is at least 70%, at least 75%, at least 80%, at least 85%, at least 90%, at least 95%, at least 99%, or 100% identical to SEQ ID NO: 29. In some instances, the crRNA and tracrRNA are linked as a sgRNA.

[0668] In some instances, compositions disclosed herein comprises an effector protein comprising an amino acid sequence that is at least 70%, at least 75%, at least 80%, at least 85%, at least 90%, at least 95%, at least 99%, or 100% identical to any one of SEQ ID NOs: 22-34; a crRNA comprising a nucleobase sequence that is at least 70%, at least 75%, at least 80%, at least 85%, at least 90%, at least 95%, or 100% identical to SEQ ID NO: 75; and a tracrRNA comprising a nucleobase sequence that is at least 70%, at least 75%, at least 80%, at least 85%, at least 90%, at least 95%, or 100% identical to SEQ ID NO: 124. In some instances, effector protein comprises an amino acid sequence that is at least 70%, at least 75%, at least 80%, at least 85%, at least 90%, at least 95%, at least 99%, or 100% identical to SEQ ID NO: 30. In some instances, the amino acid sequence of the effector protein is at least 70%, at least 75%, at least 80%, at least 85%, at least 90%, at least 95%, at least 99%, or 100% identical to SEQ ID NO: 30. In some instances, the crRNA and tracrRNA are linked as a sgRNA.

[0669] In some instances, compositions disclosed herein comprises an effector protein comprising an amino acid sequence that is at least 70%, at least 75%, at least 80%, at least 85%, at least 90%, at least 95%, at least 99%, or 100% identical to any one of SEQ ID NOs: 22-34; a crRNA comprising a nucleobase sequence that is at least 70%, at least 75%, at least 80%, at least 85%, at least 90%, at least 95%, or 100% identical to SEQ ID NO: 76; and a tracrRNA comprising a nucleobase sequence that is at least 70%, at least 75%, at least 80%, at least 85%, at least 90%, at least 95%, or 100% identical to SEQ ID NO: 122. In some instances, effector protein comprises an amino acid sequence that is at least 70%, at least 75%, at least 80%, at least 85%, at least 90%, at least 95%, at least 99%, or 100% identical to SEQ ID NO: 31. In some instances, the amino acid sequence of the effector protein is at least 70%, at least 75%, at least 80%, at least 85%, at least 90%, at least 95%, at least 99%, or 100% identical to SEQ ID NO: 31. In some instances, the crRNA and tracrRNA are linked as a sgRNA.

[0670] In some instances, compositions disclosed herein comprises an effector protein comprising an amino acid sequence that is at least 70%, at least 75%, at least 80%, at least 85%, at least 90%, at least 95%, at least 99%, or 100% identical to any one of SEQ ID NOs: 22-34; a crRNA comprising a nucleobase sequence that is at least 70%, at least 75%, at least 80%, at least 85%, at least 90%, at least 95%, or 100% identical to SEQ ID NO: 77; and a tracrRNA comprising a nucleobase sequence that is at least 70%, at least 75%, at least 80%, at least 85%, at least 90%, at least 95%, or 100% identical to SEQ ID NO: 124. In some instances, effector protein comprises an amino acid sequence that is at least 70%, at least 75%, at least 80%, at least 85%, at least 90%, at least 95%, at least 99%, or 100% identical to SEQ ID NO: 32. In some instances, the amino acid sequence of the effector protein is at least 70%, at least 75%, at least 80%, at least 85%, at least 90%, at least 95%, at least 99%, or 100% identical to SEQ ID NO: 32. In some instances, the crRNA and tracrRNA are linked as a sgRNA.

[0671] In some instances, compositions disclosed herein comprises an effector protein comprising an amino acid sequence that is at least 70%, at least 75%, at least 80%, at least 85%, at least 90%, at least 95%, at least 99%, or 100% identical to any one of SEQ ID NOs: 22-34; a crRNA comprising a nucleobase sequence that is at least 70%, at least 75%, at least 80%, at least 85%, at least 90%, at least 95%, or 100% identical to SEQ ID NO: 78; and a tracrRNA comprising a nucleobase sequence that is at least 70%, at least 75%, at least 80%, at least 85%, at least 90%, at least 95%, or 100% identical to SEQ ID NO: 125. In some instances, effector protein comprises an amino acid sequence that is at least 70%, at least 75%, at least 80%, at least 85%, at least 90%, at least 95%, at least 99%, or 100% identical to SEQ ID NO: 33. In some instances, the amino acid sequence of the effector protein is at least 70%, at least 75%, at least 80%, at least 85%, at least 90%, at least 95%, at least 99%, or 100% identical to SEQ ID NO: 33. In some instances, the crRNA and tracrRNA are linked as a sgRNA.

[0672] In some instances, compositions disclosed herein comprises an effector protein comprising an amino acid sequence that is at least 70%, at least 75%, at least 80%, at least 85%, at least 90%, at least 95%, at least 99%, or 100% identical to any one of SEQ ID NOs: 22-34; a crRNA comprising a nucleobase sequence that is at least 70%, at least 75%, at least 80%, at least 85%, at least 90%, at least 95%, or 100% identical to SEQ ID NO: 78; and a tracrRNA comprising a nucleobase sequence that is at least 70%, at least 75%, at least 80%, at least 85%, at least 90%, at least 95%, or 100% identical to SEQ ID NO: 126. In some instances, effector protein comprises an amino acid sequence that is at least 70%, at least 75%, at least 80%, at least 85%, at least 90%, at least 95%, at least 99%, or 100% identical to SEQ ID NO: 33. In some instances, the amino acid sequence of the effector protein is at least 70%, at least 75%, at least 80%, at least 85%, at least 90%, at least 95%, at least 99%, or 100% identical to SEQ ID NO: 33. In some instances, the crRNA and tracrRNA are linked as a sgRNA.

[0673] In some instances, compositions disclosed herein comprises an effector protein comprising an amino acid sequence that is at least 70%, at least 75%, at least 80%, at least 85%, at least 90%, at least 95%, at least 99%, or 100% identical to any one of SEQ ID NOs: 22-34; a crRNA comprising a nucleobase sequence that is at least 70%, at least 75%, at least 80%, at least 85%, at least 90%, at least 95%, or 100% identical to SEQ ID NO: 79; and a tracrRNA comprising a nucleobase sequence that is at least 70%, at least 75%, at least 80%, at least 85%, at least 90%, at least 95%, or 100% identical to SEQ ID NO: 127. In some instances, effector protein comprises an amino acid sequence that is at least 70%, at least 75%, at least 80%, at least 85%, at least 90%, at least 95%, at least 99%, or 100% identical to SEQ ID NO: 34. In some instances, the amino acid sequence of the effector protein is at least 70%, at least 75%, at least 80%, at least 85%, at least 90%, at least 95%, at least 99%, or 100% identical to SEQ ID NO: 34. In some instances, the crRNA and tracrRNA are linked as a sgRNA.

[0674] In some instances, compositions disclosed herein comprises an effector protein comprising an amino acid sequence that is at least 70%, at least 75%, at least 80%, at least 85%, at least 90%, at least 95%, at least 99%, or 100% identical to any one of SEQ ID NOs: 35-45; a crRNA comprising a nucleobase sequence that is at least 70%, at least 75%, at least 80%, at least 85%, at least 90%, at least 95%, or 100% identical to SEQ ID NO: 80; and a tracrRNA comprising a nucleobase sequence that is at least 70%, at least 75%, at least 80%, at least 85%, at least 90%, at least 95%, or 100% identical to SEQ ID NO: 128. In some instances, effector protein comprises an amino acid sequence that is at least 70%, at least 75%, at least 80%, at least 85%, at least 90%, at least 95%, at least 99%, or 100% identical to SEQ ID NO: 35. In some instances, the amino acid sequence of the effector protein is at least 70%, at least 75%, at least 80%, at least 85%, at least 90%, at least 95%, at least 99%, or 100% identical to SEQ ID NO: 35. In some instances, the crRNA and tracrRNA are linked as a sgRNA.

[0675] In some instances, compositions disclosed herein comprises an effector protein comprising an amino acid sequence that is at least 70%, at least 75%, at least 80%, at least 85%, at least 90%, at least 95%, at least 99%, or 100% identical to any one of SEQ ID NOs: 35-45; a crRNA comprising a nucleobase sequence that is at least 70%, at least 75%, at least 80%, at least 85%, at least 90%, at least 95%, or 100% identical to SEQ ID NO: 80; and a tracrRNA comprising a nucleobase sequence that is at least 70%, at least 75%, at least 80%, at least 85%, at least 90%, at least 95%, or 100% identical to SEQ ID NO: 129. In some instances, effector protein comprises an amino acid sequence that is at least 70%, at least 75%, at least 80%, at least 85%, at least 90%, at least 95%, at least 99%, or 100% identical to SEQ ID NO: 35. In some instances, the amino acid sequence of the effector protein is at least 70%, at least 75%, at least 80%, at least 85%, at least 90%, at least 95%, at least 99%, or 100% identical to SEQ ID NO: 35. In some instances, the crRNA and tracrRNA are linked as a sgRNA.

[0676] In some instances, compositions disclosed herein comprises an effector protein comprising an amino acid sequence that is at least 70%, at least 75%, at least 80%, at least 85%, at least 90%, at least 95%, at least 99%, or 100% identical to any one of SEQ ID NOs: 35-45; a crRNA comprising a nucleobase sequence that is at least 70%, at least 75%, at least 80%, at least 85%, at least 90%, at least 95%, or 100% identical to SEQ ID NO: 81; and a tracrRNA comprising a nucleobase sequence that is at least 70%, at least 75%, at least 80%, at least 85%, at least 90%, at least 95%, or 100% identical to SEQ ID NO: 130. In some instances, effector protein comprises an amino acid sequence that is at least 70%, at least 75%, at least 80%, at least 85%, at least 90%, at least 95%, at least 99%, or 100% identical to SEQ ID NO: 36. In some instances, the amino acid sequence of the effector protein is at least 70%, at least 75%, at least 80%, at least 85%, at least 90%, at least 95%, at least 99%, or 100% identical to SEQ ID NO: 36. In some instances, the crRNA and tracrRNA are linked as a sgRNA.

[0677] In some instances, compositions disclosed herein comprises an effector protein comprising an amino acid sequence that is at least 70%, at least 75%, at least 80%, at least 85%, at least 90%, at least 95%, at least 99%, or 100% identical to any one of SEQ ID NOs: 35-45; a crRNA comprising a nucleobase sequence that is at least 70%, at least 75%, at least 80%, at least 85%, at least 90%, at least 95%, or 100% identical to SEQ ID NO: 81; and a tracrRNA comprising a nucleobase sequence that is at least 70%, at least 75%, at least 80%, at least 85%, at least 90%, at least 95%, or 100% identical to SEQ ID NO: 131. In some instances, effector protein comprises an amino acid sequence that is at least 70%, at least 75%, at least 80%, at least 85%, at least 90%, at least 95%, at least 99%, or 100% identical to SEQ ID NO: 36. In some instances, the amino acid sequence of the effector protein is at least 70%, at least 75%, at least 80%, at least 85%, at least 90%, at least 95%, at least 99%, or 100% identical to SEQ ID NO: 36. In some instances, the crRNA and tracrRNA are linked as a sgRNA.

[0678] In some instances, compositions disclosed herein comprises an effector protein comprising an amino acid sequence that is at least 70%, at least 75%, at least 80%, at least 85%, at least 90%, at least 95%, at least 99%, or 100% identical to any one of SEQ ID NOs: 35-45; a crRNA comprising a nucleobase sequence that is at least 70%, at least 75%, at least 80%, at least 85%, at least 90%, at least 95%, or 100% identical to SEQ ID NO: 82; and a tracrRNA comprising a nucleobase sequence that is at least 70%, at least 75%, at least 80%, at least 85%, at least 90%, at least 95%, or 100% identical to SEQ ID NO: 132. In some instances, effector protein comprises an amino acid sequence that is at least 70%, at least 75%, at least 80%, at least 85%, at least 90%, at least 95%, at least 99%, or 100% identical to SEQ ID NO: 37. In some instances, the amino acid sequence of the effector protein is at least 70%, at least 75%, at least 80%, at least 85%, at least 90%, at least 95%, at least 99%, or 100% identical to SEQ ID NO: 37. In some instances, the crRNA and tracrRNA are linked as a sgRNA.

[0679] In some instances, compositions disclosed herein comprises an effector protein comprising an amino acid sequence that is at least 70%, at least 75%, at least 80%, at least 85%, at least 90%, at least 95%, at least 99%, or 100% identical to any one of SEQ ID NOs: 35-45; a crRNA comprising a nucleobase sequence that is at least 70%, at least 75%, at least 80%, at least 85%, at least 90%, at least 95%, or 100% identical to SEQ ID NO: 82; and a tracrRNA comprising a nucleobase sequence that is at least 70%, at least 75%, at least 80%, at least 85%, at least 90%, at least 95%, or 100% identical to SEQ ID NO: 133. In some instances, effector protein comprises an amino acid sequence that is at least 70%, at least 75%, at least 80%, at least 85%, at least 90%, at least 95%, at least 99%, or 100% identical to SEQ ID NO: 37. In some instances, the amino acid sequence of the effector protein is at least 70%, at least 75%, at least 80%, at least 85%, at least 90%, at least 95%, at least 99%, or 100% identical to SEQ ID NO: 37. In some instances, the crRNA and tracrRNA are linked as a sgRNA.

[0680] In some instances, compositions disclosed herein comprises an effector protein comprising an amino acid sequence that is at least 70%, at least 75%, at least 80%, at least 85%, at least 90%, at least 95%, at least 99%, or 100% identical to any one of SEQ ID NOs: 35-45; a crRNA comprising a nucleobase sequence that is at least 70%, at least 75%, at least 80%, at least 85%, at least 90%, at least 95%, or 100% identical to SEQ ID NO: 83; and a tracrRNA comprising a nucleobase sequence that is at least 70%, at least 75%, at least 80%, at least 85%, at least 90%, at least 95%, or 100% identical to SEQ ID NO: 134. In some instances, effector protein comprises an amino acid sequence that is at least 70%, at least 75%, at least 80%, at least 85%, at least 90%, at least 95%, at least 99%, or 100% identical to SEQ ID NO: 38. In some instances, the amino acid sequence of the effector protein is at least 70%, at least 75%, at least 80%, at least 85%, at least 90%, at least 95%, at least 99%, or 100% identical to SEQ ID NO: 38. In some instances, the crRNA and tracrRNA are linked as a sgRNA.

[0681] In some instances, compositions disclosed herein comprises an effector protein comprising an amino acid sequence that is at least 70%, at least 75%, at least 80%, at least 85%, at least 90%, at least 95%, at least 99%, or 100% identical to any one of SEQ ID NOs: 35-45; a crRNA comprising a nucleobase sequence that is at least 70%, at least 75%, at least 80%, at least 85%, at least 90%, at least 95%, or 100% identical to SEQ ID NO: 83; and a tracrRNA comprising a nucleobase sequence that is at least 70%, at least 75%, at least 80%, at least 85%, at least 90%, at least 95%, or 100% identical to SEQ ID NO: 135. In some instances, effector protein comprises an amino acid sequence that is at least 70%, at least 75%, at least 80%, at least 85%, at least 90%, at least 95%, at least 99%, or 100% identical to SEQ ID NO: 38. In some instances, the amino acid sequence of the effector protein is at least 70%, at least 75%, at least 80%, at least 85%, at least 90%, at least 95%, at least 99%, or 100% identical to SEQ ID NO: 38. In some instances, the crRNA and tracrRNA are linked as a sgRNA.

[0682] In some instances, compositions disclosed herein comprises an effector protein comprising an amino acid sequence that is at least 70%, at least 75%, at least 80%, at least 85%, at least 90%, at least 95%, at least 99%, or 100% identical to any one of SEQ ID NOs: 35-45; a crRNA comprising a nucleobase sequence that is at least 70%, at least 75%, at least 80%, at least 85%, at least 90%, at least 95%, or 100% identical to SEQ ID NO: 84; and a tracrRNA comprising a nucleobase sequence that is at least 70%, at least 75%, at least 80%, at least 85%, at least 90%, at least 95%, or 100% identical to SEQ ID NO: 136. In some instances, effector protein comprises an amino acid sequence that is at least 70%, at least 75%, at least 80%, at least 85%, at least 90%, at least 95%, at least 99%, or 100% identical to SEQ ID NO: 39. In some instances, the amino acid sequence of the effector protein is at least 70%, at least 75%, at least 80%, at least 85%, at least 90%, at least 95%, at least 99%, or 100% identical to SEQ ID NO: 39. In some instances, the crRNA and tracrRNA are linked as a sgRNA.

[0683] In some instances, compositions disclosed herein comprises an effector protein comprising an amino acid sequence that is at least 70%, at least 75%, at least 80%, at least 85%, at least 90%, at least 95%, at least 99%, or 100% identical to any one of SEQ ID NOs: 35-45; a crRNA comprising a nucleobase sequence that is at least 70%, at least 75%, at least 80%, at least 85%, at least 90%, at least 95%, or 100% identical to SEQ ID NO: 84; and a tracrRNA comprising a nucleobase sequence that is at least 70%, at least 75%, at least 80%, at least 85%, at least 90%, at least 95%, or 100% identical to SEQ ID NO: 137. In some instances, effector protein comprises an amino acid sequence that is at least 70%, at least 75%, at least 80%, at least 85%, at least 90%, at least 95%, at least 99%, or 100% identical to SEQ ID NO: 39. In some instances, the amino acid sequence of the effector protein is at least 70%, at least 75%, at least 80%, at least 85%, at least 90%, at least 95%, at least 99%, or 100% identical to SEQ ID NO: 39. In some instances, the crRNA and tracrRNA are linked as a sgRNA.

[0684] In some instances, compositions disclosed herein comprises an effector protein comprising an amino acid sequence that is at least 70%, at least 75%, at least 80%, at least 85%, at least 90%, at least 95%, at least 99%, or 100% identical to any one of SEQ ID NOs: 35-45; a crRNA comprising a nucleobase sequence that is at least 70%, at least 75%, at least 80%, at least 85%, at least 90%, at least 95%, or 100% identical to SEQ ID NO: 85; and a tracrRNA comprising a nucleobase sequence that is at least 70%, at least 75%, at least 80%, at least 85%, at least 90%, at least 95%, or 100% identical to SEQ ID NO: 138. In some instances, effector protein comprises an amino acid sequence that is at least 70%, at least 75%, at least 80%, at least 85%, at least 90%, at least 95%, at least 99%, or 100% identical to SEQ ID NO: 40. In some instances, the amino acid sequence of the effector protein is at least 70%, at least 75%, at least 80%, at least 85%, at least 90%, at least 95%, at least 99%, or 100% identical to SEQ ID NO: 40. In some instances, the crRNA and tracrRNA are linked as a sgRNA.

[0685] In some instances, compositions disclosed herein comprises an effector protein comprising an amino acid sequence that is at least 70%, at least 75%, at least 80%, at least 85%, at least 90%, at least 95%, at least 99%, or 100% identical to any one of SEQ ID NOs: 35-45; a crRNA comprising a nucleobase sequence that is at least 70%, at least 75%, at least 80%, at least 85%, at least 90%, at least 95%, or 100% identical to SEQ ID NO: 86; and a tracrRNA comprising a nucleobase sequence that is at least 70%, at least 75%, at least 80%, at least 85%, at least 90%, at least 95%, or 100% identical to SEQ ID NO: 139. In some instances, effector protein comprises an amino acid sequence that is at least 70%, at least 75%, at least 80%, at least 85%, at least 90%, at least 95%, at least 99%, or 100% identical to SEQ ID NO: 41. In some instances, the amino acid sequence of the effector protein is at least 70%, at least 75%, at least 80%, at least 85%, at least 90%, at least 95%, at least 99%, or 100% identical to SEQ ID NO: 41. In some instances, the crRNA and tracrRNA are linked as a sgRNA.

[0686] In some instances, compositions disclosed herein comprises an effector protein comprising an amino acid sequence that is at least 70%, at least 75%, at least 80%, at least 85%, at least 90%, at least 95%, at least 99%, or 100% identical to any one of SEQ ID NOs: 35-45; a crRNA comprising a nucleobase sequence that is at least 70%, at least 75%, at least 80%, at least 85%, at least 90%, at least 95%, or 100% identical to SEQ ID NO: 86; and a tracrRNA comprising a nucleobase sequence that is at least 70%, at least 75%, at least 80%, at least 85%, at least 90%, at least 95%, or 100% identical to SEQ ID NO: 140. In some instances, effector protein comprises an amino acid sequence that is at least 70%, at least 75%, at least 80%, at least 85%, at least 90%, at least 95%, at least 99%, or 100% identical to SEQ ID NO: 41. In some instances, the amino acid sequence of the effector protein is at least 70%, at least 75%, at least 80%, at least 85%, at least 90%, at least 95%, at least 99%, or 100% identical to SEQ ID NO: 41. In some instances, the crRNA and tracrRNA are linked as a sgRNA.

[0687] In some instances, compositions disclosed herein comprises an effector protein comprising an amino acid sequence that is at least 70%, at least 75%, at least 80%, at least 85%, at least 90%, at least 95%, at least 99%, or 100% identical to any one of SEQ ID NOs: 35-45; a crRNA comprising a nucleobase sequence that is at least 70%, at least 75%, at least 80%, at least 85%, at least 90%, at least 95%, or 100% identical to SEQ ID NO: 87; and a tracrRNA comprising a nucleobase sequence that is at least 70%, at least 75%, at least 80%, at least 85%, at least 90%, at least 95%, or 100% identical to SEQ ID NO: 141. In some instances, effector protein comprises an amino acid sequence that is at least 70%, at least 75%, at least 80%, at least 85%, at least 90%, at least 95%, at least 99%, or 100% identical to SEQ ID NO: 42. In some instances, the amino acid sequence of the effector protein is at least 70%, at least 75%, at least 80%, at least 85%, at least 90%, at least 95%, at least 99%, or 100% identical to SEQ ID NO: 42. In some instances, the crRNA and tracrRNA are linked as a sgRNA.

[0688] In some instances, compositions disclosed herein comprises an effector protein comprising an amino acid sequence that is at least 70%, at least 75%, at least 80%, at least 85%, at least 90%, at least 95%, at least 99%, or 100% identical to any one of SEQ ID NOs: 35-45; a crRNA comprising a nucleobase sequence that is at least 70%, at least 75%, at least 80%, at least 85%, at least 90%, at least 95%, or 100% identical to SEQ ID NO: 87; and a tracrRNA comprising a nucleobase sequence that is at least 70%, at least 75%, at least 80%, at least 85%, at least 90%, at least 95%, or 100% identical to SEQ ID NO: 142. In some instances, effector protein comprises an amino acid sequence that is at least 70%, at least 75%, at least 80%, at least 85%, at least 90%, at least 95%, at least 99%, or 100% identical to SEQ ID NO: 42. In some instances, the amino acid sequence of the effector protein is at least 70%, at least 75%, at least 80%, at least 85%, at least 90%, at least 95%, at least 99%, or 100% identical to SEQ ID NO: 42. In some instances, the crRNA and tracrRNA are linked as a sgRNA.

[0689] In some instances, compositions disclosed herein comprises an effector protein comprising an amino acid sequence that is at least 70%, at least 75%, at least 80%, at least 85%, at least 90%, at least 95%, at least 99%, or 100% identical to any one of SEQ ID NOs: 35-45; a crRNA comprising a nucleobase sequence that is at least 70%, at least 75%, at least 80%, at least 85%, at least 90%, at least 95%, or 100% identical to SEQ ID NO: 88; and a tracrRNA comprising a nucleobase sequence that is at least 70%, at least 75%, at least 80%, at least 85%, at least 90%, at least 95%, or 100% identical to SEQ ID NO: 143. In some instances, effector protein comprises an amino acid sequence that is at least 70%, at least 75%, at least 80%, at least 85%, at least 90%, at least 95%, at least 99%, or 100% identical to SEQ ID NO: 43. In some instances, the amino acid sequence of the effector protein is at least 70%, at least 75%, at least 80%, at least 85%, at least 90%, at least 95%, at least 99%, or 100% identical to SEQ ID NO: 43. In some instances, the crRNA and tracrRNA are linked as a sgRNA.

[0690] In some instances, compositions disclosed herein comprises an effector protein comprising an amino acid sequence that is at least 70%, at least 75%, at least 80%, at least 85%, at least 90%, at least 95%, at least 99%, or 100% identical to any one of SEQ ID NOs: 35-45; a crRNA comprising a nucleobase sequence that is at least 70%, at least 75%, at least 80%, at least 85%, at least 90%, at least 95%, or 100% identical to SEQ ID NO: 88; and a tracrRNA comprising a nucleobase sequence that is at least 70%, at least 75%, at least 80%, at least 85%, at least 90%, at least 95%, or 100% identical to SEQ ID NO: 144. In some instances, effector protein comprises an amino acid sequence that is at least 70%, at least 75%, at least 80%, at least 85%, at least 90%, at least 95%, at least 99%, or 100% identical to SEQ ID NO: 43. In some instances, the amino acid sequence of the effector protein is at least 70%, at least 75%, at least 80%, at least 85%, at least 90%, at least 95%, at least 99%, or 100% identical to SEQ ID NO: 43. In some instances, the crRNA and tracrRNA are linked as a sgRNA.

[0691] In some instances, compositions disclosed herein comprises an effector protein comprising an amino acid sequence that is at least 70%, at least 75%, at least 80%, at least 85%, at least 90%, at least 95%, at least 99%, or 100% identical to any one of SEQ ID NOs: 35-45; a crRNA comprising a nucleobase sequence that is at least 70%, at least 75%, at least 80%, at least 85%, at least 90%, at least 95%, or 100% identical to SEQ ID NO: 89; and a tracrRNA comprising a nucleobase sequence that is at least 70%, at least 75%, at least 80%, at least 85%, at least 90%, at least 95%, or 100% identical to SEQ ID NO: 145. In some instances, effector protein comprises an amino acid sequence that is at least 70%, at least 75%, at least 80%, at least 85%, at least 90%, at least 95%, at least 99%, or 100% identical to SEQ ID NO: 44. In some instances, the amino acid sequence of the effector protein is at least 70%, at least 75%, at least 80%, at least 85%, at least 90%, at least 95%, at least 99%, or 100% identical to SEQ ID NO: 44. In some instances, the crRNA and tracrRNA are linked as a sgRNA.

[0692] In some instances, compositions disclosed herein comprises an effector protein comprising an amino acid sequence that is at least 70%, at least 75%, at least 80%, at least 85%, at least 90%, at least 95%, at least 99%, or 100% identical to any one of SEQ ID NOs: 35-45; a crRNA comprising a nucleobase sequence that is at least 70%, at least 75%, at least 80%, at least 85%, at least 90%, at least 95%, or 100% identical to SEQ ID NO: 89; and a tracrRNA comprising a nucleobase sequence that is at least 70%, at least 75%, at least 80%, at least 85%, at least 90%, at least 95%, or 100% identical to SEQ ID NO: 146. In some instances, effector protein comprises an amino acid sequence that is at least 70%, at least 75%, at least 80%, at least 85%, at least 90%, at least 95%, at least 99%, or 100% identical to SEQ ID NO: 44. In some instances, the amino acid sequence of the effector protein is at least 70%, at least 75%, at least 80%, at least 85%, at least 90%, at least 95%, at least 99%, or 100% identical to SEQ ID NO: 44. In some instances, the crRNA and tracrRNA are linked as a sgRNA.

[0693] In some instances, compositions disclosed herein comprises an effector protein comprising an amino acid sequence that is at least 70%, at least 75%, at least 80%, at least 85%, at least 90%, at least 95%, at least 99%, or 100% identical to any one of SEQ ID NOs: 35-45; a crRNA comprising a nucleobase sequence that is at least 70%, at least 75%, at least 80%, at least 85%, at least 90%, at least 95%, or 100% identical to SEQ ID NO: 90; and a tracrRNA comprising a nucleobase sequence that is at least 70%, at least 75%, at least 80%, at least 85%, at least 90%, at least 95%, or 100% identical to SEQ ID NO: 147. In some instances, effector protein comprises an amino acid sequence that is at least 70%, at least 75%, at least 80%, at least 85%, at least 90%, at least 95%, at least 99%, or 100% identical to SEQ ID NO: 45. In some instances, the amino acid sequence of the effector protein is at least 70%, at least 75%, at least 80%, at least 85%, at least 90%, at least 95%, at least 99%, or 100% identical to SEQ ID NO: 45. In some instances, the crRNA and tracrRNA are linked as a sgRNA.

[0694] In some instances, compositions disclosed herein comprises an effector protein comprising an amino acid sequence that is at least 70%, at least 75%, at least 80%, at least 85%, at least 90%, at least 95%, at least 99%, or 100% identical to any one of SEQ ID NOs: 35-45; a crRNA comprising a nucleobase sequence that is at least 70%, at least 75%, at least 80%, at least 85%, at least 90%, at least 95%, or 100% identical to SEQ ID NO: 90; and a tracrRNA comprising a nucleobase sequence that is at least 70%, at least 75%, at least 80%, at least 85%, at least 90%, at least 95%, or 100% identical to SEQ ID NO: 148. In some instances, effector protein comprises an amino acid sequence that is at least 70%, at least 75%, at least 80%, at least 85%, at least 90%, at least 95%, at least 99%, or 100% identical to SEQ ID NO: 45. In some instances, the amino acid sequence of the effector protein is at least 70%, at least 75%, at least 80%, at least 85%, at least 90%, at least 95%, at least 99%, or 100% identical to SEQ ID NO: 45. In some instances, the crRNA and tracrRNA are linked as a sgRNA.

[0695] A guide nucleic acid can comprise RNA, DNA, or a combination thereof. The term “gRNA” refers to a guide nucleic acid comprising RNA. A gRNA may include nucleosides that are not ribonucleic. In some embodiments, all nucleosides in a gRNA are ribonucleic. In some embodiments, some of the nucleosides in a gRNA are not ribonucleic. In embodiments where nucleosides in a gRNA are not ribonucleic, non-ribonucleic nucleosides may be naturally occurring or non-naturally-occurring nucleosides. In some embodiments, inter-nucleoside links are phosphodiester bonds. In some embodiments, the inter-nucleoside link between at least two nucleosides in a guide nucleic acid is not a phosphodiester bond. In some embodiments, the inter-nucleoside link between at least two nucleosides is a non-natural inter nucleoside linkage. Non-natural inter-nucleoside linkages include phosphorous and non-phosphorous inter-nucleoside linkages. Phosphorous inter-nucleoside linkages include phosphorothioate linkages and thiophosphate linkages. An inter-nucleoside linkage may comprise a “C3 spacer”. C3 spacers are known to the skilled person as comprising a chain of three carbon atoms.

[0696] Guide nucleic acids may be modified to improve genome editing efficiency, increase stability, reduce off-target effects, and/or increase the affinity of the guide nucleic acid for an effector protein disclosed herein.

[0697] Modifications may include non-natural nucleotides and/or non-natural linkages. In addition or alternatively, one or more sugar moieties of the guide nucleic acid may be modified. Such sugar moiety modifications may include 2′-O-methyl (2′OMe), 2′-O-methyoxy-ethyl and 2′ fluoro. In some embodiments, editing efficiency, or genome editing efficiency, is determined by analyzing the frequency of indel mutations in a nucleic acid or gene knockout. In some embodiments, the use of a flow cytometer or next generation sequencing may be used to analyze cells for indel mutations or gene knockout. In other embodiments, off-target effects may be detected using a flow cytometer, next generation sequencing, or CIRCLE-seq.

[0698] In some preferred embodiments, the first 3 nucleosides (or one of the first 3 nucleosides, or a combination of the first 3 nucleosides) from the 5′ end of the repeat region comprise a 2′-O-methyl modification and the linkages between the 3 nucleosides at the 3′ end of the spacer region comprise phosphorothioate linkages.

[0699] In some embodiments, the first nucleoside at the 5′ end of the repeat region comprises a 2′-O-methyl modification. In some embodiments, the first two nucleosides at the 5′ end of the repeat region comprise 2′-O-methyl modifications. In some embodiments, the first three nucleosides at the 5′ end of the repeat region comprise 2′-O-methyl modifications. In some embodiments, the last nucleoside at the 3′ end of the spacer region comprises a 2′-O-methyl modification. In some embodiments, the last two nucleosides at the 3′ end of the spacer region comprise 2′-O-methyl modifications. In some embodiments, the last three nucleosides at the 3′ end of the spacer region comprise 2′-O-methyl modifications.

[0700] In some embodiments, the first 3 nucleosides (or one of the first 3 nucleosides, or a combination of the first 3 nucleosides) from the 5′ end of the repeat region and the 3 nucleosides at the 3′ end of the spacer region comprise a 2′-O-methyl modification, and the linkages between the 3 nucleosides at the 3′ end of the spacer region comprise phosphorothioate linkages.

[0701] In some embodiments, the first 3 nucleosides (or one of the first 3 nucleosides, or a combination of the first 3 nucleosides) from the 5′ end of the repeat region and the 3 nucleosides at the 3′ end of the spacer region comprise a 2′-fluoro modification.

[0702] In some embodiments, the first nucleoside at the 5′ end of the repeat region comprises a 2′ fluoro modification. In some embodiments, the first two nucleosides at the 5′ end of the repeat region comprise 2′ fluoro modifications. In some embodiments, the first three nucleosides at the 5′ end of the repeat region comprise 2′ fluoro modifications. In some embodiments, the last nucleoside at the 3′ end of the spacer region comprises a 2′ fluoro modification. In some embodiments, the last two nucleosides at the 3′ end of the spacer region comprise 2′ fluoro modifications. In some embodiments, the last three nucleosides at the 3′ end of the spacer region comprise 2′ fluoro modifications. In preferred embodiments, the last three nucleosides at the 3′ end of the spacer region comprise 2′ fluoro modifications.

[0703] In preferred embodiments, the first two nucleosides at the 5′ end of the repeat region comprise 2′-O-methyl modifications, the first two nucleosides at the 5′ end of the repeat are linked by a phosphorothioate linkage, and the last three nucleosides at the 3′ end of the spacer region comprise 2′ fluoro modifications.

[0704] In some embodiments, the linkage between the two nucleosides at the 5′ end of the repeat region comprises a 3C spacer and the linkage between the two nucleosides at the 3′ end of the spacer region comprises a 3C spacer.

[0705] In some embodiments, the guide nucleic acid comprises ribonucleic nucleosides and deoxyribonucleic nucleosides. In some embodiments, the guide nucleic acid is a guide RNA wherein the first, eighth and ninth nucleosides from the 5′ end of the spacer region and the four nucleosides at the 3′ end of the spacer region are deoxyribonucleic nucleosides.

[0706] In some embodiments, the guide nucleic acid comprises a polyA tail. In some preferred embodiments, the guide nucleic acid comprises a polyA tail at the 3′ end of the spacer region.

[0707] In some embodiments, the engineered guide nucleic acid comprises at least 10, 11, 12, 13, 14, 15, 16, 17, 18, 19, 20, 21, 22, 23, 24, 25, 26, 27, 28, 29, or 30 contiguous nucleotides that are complementary to a eukaryotic sequence. Such a eukaryotic sequence is a sequence of nucleotides that is present in a host eukaryotic cell. Such a sequence of nucleotides is distinguished from nucleotide sequences present in other host cells, such as prokaryotic cells, or viruses. Said sequences present in a eukaryotic cell can be located a gene, an exon, an intron, a non-coding (e.g., promoter or enhancer) region, a selectable marker, tag, signal, and the like. In some cases, the engineered guide nucleic acid comprises at least 10 contiguous nucleotides that are complementary to a eukaryotic sequence. In some cases, the engineered guide nucleic acid comprises at least 11 contiguous nucleotides that are complementary to a eukaryotic sequence. In some cases, the engineered guide nucleic acid comprises at least 12 contiguous nucleotides that are complementary to a eukaryotic sequence. In some cases, the engineered guide nucleic acid comprises at least 13 contiguous nucleotides that are complementary to a eukaryotic sequence. In some cases, the engineered guide nucleic acid comprises at least 14 contiguous nucleotides that are complementary to a eukaryotic sequence. In some cases, the engineered guide nucleic acid comprises at least 15 contiguous nucleotides that are complementary to a eukaryotic sequence. In some cases, the engineered guide nucleic acid comprises at least 16 contiguous nucleotides that are complementary to a eukaryotic sequence. In some cases, the engineered guide nucleic acid comprises at least 17 contiguous nucleotides that are complementary to a eukaryotic sequence. In some cases, the engineered guide nucleic acid comprises at least 18 contiguous nucleotides that are complementary to a eukaryotic sequence. In some cases, the engineered guide nucleic acid comprises at least 19 contiguous nucleotides that are complementary to a eukaryotic sequence. In some cases, the engineered guide nucleic acid comprises at least 20 contiguous nucleotides that are complementary to a eukaryotic sequence. In some cases, the engineered guide nucleic acid comprises at least 21 contiguous nucleotides that are complementary to a eukaryotic sequence. In some cases, the engineered guide nucleic acid comprises at least 22 contiguous nucleotides that are complementary to a eukaryotic sequence. In some cases, the engineered guide nucleic acid comprises at least 23 contiguous nucleotides that are complementary to a eukaryotic sequence. In some cases, the engineered guide nucleic acid comprises at least 24 contiguous nucleotides that are complementary to a eukaryotic sequence. In some cases, the engineered guide nucleic acid comprises at least 25 contiguous nucleotides that are complementary to a eukaryotic sequence. In some cases, the engineered guide nucleic acid comprises at least 26 contiguous nucleotides that are complementary to a eukaryotic sequence. In some cases, the engineered guide nucleic acid comprises at least 27 contiguous nucleotides that are complementary to a eukaryotic sequence. In some cases, the engineered guide nucleic acid comprises at least 28 contiguous nucleotides that are complementary to a eukaryotic sequence. In some cases, the engineered guide nucleic acid comprises at least 29 contiguous nucleotides that are complementary to a eukaryotic sequence. In some cases, the engineered guide nucleic acid comprises at least 30 or more contiguous nucleotides that are complementary to a eukaryotic sequence.

### Effector Protein-sgRNA Complexes

[0708] In some instances, compositions disclosed herein comprises an effector protein comprising an amino acid sequence that is at least 70%, at least 75%, at least 80%, at least 85%, at least 90%, at least 95%, at least 99%, or 100% identical to any one of SEQ ID NOs: 22-34; and a guide RNA comprising a nucleobase sequence that is at least 70%, at least 75%, at least 80%, at least 85%, at least 90%, at least 95%, at least 97%, at least 99%, or 100% identical to SEQ ID NO: 149. In some instances, effector protein comprises an amino acid sequence that is at least 70%, at least 75%, at least 80%, at least 85%, at least 90%, at least 95%, at least 99%, or 100% identical to SEQ ID NO: 22. In some instances, the amino acid sequence of the effector protein is at least 70%, at least 75%, at least 80%, at least 85%, at least 90%, at least 95%, at least 99%, or 100% identical to SEQ ID NO: 22.

[0709] In some instances, compositions disclosed herein comprises an effector protein comprising an amino acid sequence that is at least 70%, at least 75%, at least 80%, at least 85%, at least 90%, at least 95%, at least 99%, or 100% identical to any one of SEQ ID NOs: 22-34; and a guide RNA comprising a nucleobase sequence that is at least 70%, at least 75%, at least 80%, at least 85%, at least 90%, at least 95%, at least 97%, at least 99%, or 100% identical to SEQ ID NO: 149. In some instances, effector protein comprises an amino acid sequence that is at least 70%, at least 75%, at least 80%, at least 85%, at least 90%, at least 95%, at least 99%, or 100% identical to SEQ ID NO: 23. In some instances, the amino acid sequence of the effector protein is at least 70%, at least 75%, at least 80%, at least 85%, at least 90%, at least 95%, at least 99%, or 100% identical to SEQ ID NO: 23.

[0710] In some instances, compositions disclosed herein comprises an effector protein comprising an amino acid sequence that is at least 70%, at least 75%, at least 80%, at least 85%, at least 90%, at least 95%, at least 99%, or 100% identical to any one of SEQ ID NOs: 22-34; and a guide RNA comprising a nucleobase sequence that is at least 70%, at least 75%, at least 80%, at least 85%, at least 90%, at least 95%, at least 97%, at least 99%, or 100% identical to SEQ ID NO: 150. In some instances, effector protein comprises an amino acid sequence that is at least 70%, at least 75%, at least 80%, at least 85%, at least 90%, at least 95%, at least 99%, or 100% identical to SEQ ID NO: 24. In some instances, the amino acid sequence of the effector protein is at least 70%, at least 75%, at least 80%, at least 85%, at least 90%, at least 95%, at least 99%, or 100% identical to SEQ ID NO: 24.

[0711] In some instances, compositions disclosed herein comprises an effector protein comprising an amino acid sequence that is at least 70%, at least 75%, at least 80%, at least 85%, at least 90%, at least 95%, at least 99%, or 100% identical to any one of SEQ ID NOs: 22-34; and a guide RNA comprising a nucleobase sequence that is at least 70%, at least 75%, at least 80%, at least 85%, at least 90%, at least 95%, at least 97%, at least 99%, or 100% identical to SEQ ID NO: 151. In some instances, effector protein comprises an amino acid sequence that is at least 70%, at least 75%, at least 80%, at least 85%, at least 90%, at least 95%, at least 99%, or 100% identical to SEQ ID NO: 25. In some instances, the amino acid sequence of the effector protein is at least 70%, at least 75%, at least 80%, at least 85%, at least 90%, at least 95%, at least 99%, or 100% identical to SEQ ID NO: 25.

[0712] In some instances, compositions disclosed herein comprises an effector protein comprising an amino acid sequence that is at least 70%, at least 75%, at least 80%, at least 85%, at least 90%, at least 95%, at least 99%, or 100% identical to any one of SEQ ID NOs: 22-34; and a guide RNA comprising a nucleobase sequence that is at least 70%, at least 75%, at least 80%, at least 85%, at least 90%, at least 95%, at least 97%, at least 99%, or 100% identical to SEQ ID NO: 149. In some instances, effector protein comprises an amino acid sequence that is at least 70%, at least 75%, at least 80%, at least 85%, at least 90%, at least 95%, at least 99%, or 100% identical to SEQ ID NO: 26. In some instances, the amino acid sequence of the effector protein is at least 70%, at least 75%, at least 80%, at least 85%, at least 90%, at least 95%, at least 99%, or 100% identical to SEQ ID NO: 26.

[0713] In some instances, compositions disclosed herein comprises an effector protein comprising an amino acid sequence that is at least 70%, at least 75%, at least 80%, at least 85%, at least 90%, at least 95%, at least 99%, or 100% identical to any one of SEQ ID NOs: 22-34; and a guide RNA comprising a nucleobase sequence that is at least 70%, at least 75%, at least 80%, at least 85%, at least 90%, at least 95%, at least 97%, at least 99%, or 100% identical to SEQ ID NO: 150. In some instances, effector protein comprises an amino acid sequence that is at least 70%, at least 75%, at least 80%, at least 85%, at least 90%, at least 95%, at least 99%, or 100% identical to SEQ ID NO: 28. In some instances, the amino acid sequence of the effector protein is at least 70%, at least 75%, at least 80%, at least 85%, at least 90%, at least 95%, at least 99%, or 100% identical to SEQ ID NO: 28.

[0714] In some instances, compositions disclosed herein comprises an effector protein comprising an amino acid sequence that is at least 70%, at least 75%, at least 80%, at least 85%, at least 90%, at least 95%, at least 99%, or 100% identical to any one of SEQ ID NOs: 22-34; and a guide RNA comprising a nucleobase sequence that is at least 70%, at least 75%, at least 80%, at least 85%, at least 90%, at least 95%, at least 97%, at least 99%, or 100% identical to SEQ ID NO: 150. In some instances, effector protein comprises an amino acid sequence that is at least 70%, at least 75%, at least 80%, at least 85%, at least 90%, at least 95%, at least 99%, or 100% identical to SEQ ID NO: 29. In some instances, the amino acid sequence of the effector protein is at least 70%, at least 75%, at least 80%, at least 85%, at least 90%, at least 95%, at least 99%, or 100% identical to SEQ ID NO: 29.

[0715] In some instances, compositions disclosed herein comprises an effector protein comprising an amino acid sequence that is at least 70%, at least 75%, at least 80%, at least 85%, at least 90%, at least 95%, at least 99%, or 100% identical to any one of SEQ ID NOs: 22-34; and a guide RNA comprising a nucleobase sequence that is at least 70%, at least 75%, at least 80%, at least 85%, at least 90%, at least 95%, at least 97%, at least 99%, or 100% identical to SEQ ID NO: 152. In some instances, effector protein comprises an amino acid sequence that is at least 70%, at least 75%, at least 80%, at least 85%, at least 90%, at least 95%, at least 99%, or 100% identical to SEQ ID NO: 30. In some instances, the amino acid sequence of the effector protein is at least 70%, at least 75%, at least 80%, at least 85%, at least 90%, at least 95%, at least 99%, or 100% identical to SEQ ID NO: 30.

[0716] In some instances, compositions disclosed herein comprises an effector protein comprising an amino acid sequence that is at least 70%, at least 75%, at least 80%, at least 85%, at least 90%, at least 95%, at least 99%, or 100% identical to any one of SEQ ID NOs: 22-34; and a guide RNA comprising a nucleobase sequence that is at least 70%, at least 75%, at least 80%, at least 85%, at least 90%, at least 95%, at least 97%, at least 99%, or 100% identical to SEQ ID NO: 151. In some instances, effector protein comprises an amino acid sequence that is at least 70%, at least 75%, at least 80%, at least 85%, at least 90%, at least 95%, at least 99%, or 100% identical to SEQ ID NO: 31. In some instances, the amino acid sequence of the effector protein is at least 70%, at least 75%, at least 80%, at least 85%, at least 90%, at least 95%, at least 99%, or 100% identical to SEQ ID NO: 31.

[0717] In some instances, compositions disclosed herein comprises an effector protein comprising an amino acid sequence that is at least 70%, at least 75%, at least 80%, at least 85%, at least 90%, at least 95%, at least 99%, or 100% identical to any one of SEQ ID NOs: 22-34; and a guide RNA comprising a nucleobase sequence that is at least 70%, at least 75%, at least 80%, at least 85%, at least 90%, at least 95%, at least 97%, at least 99%, or 100% identical to SEQ ID NO: 152. In some instances, effector protein comprises an amino acid sequence that is at least 70%, at least 75%, at least 80%, at least 85%, at least 90%, at least 95%, at least 99%, or 100% identical to SEQ ID NO: 32. In some instances, the amino acid sequence of the effector protein is at least 70%, at least 75%, at least 80%, at least 85%, at least 90%, at least 95%, at least 99%, or 100% identical to SEQ ID NO: 32.

[0718] In some instances, compositions disclosed herein comprises an effector protein comprising an amino acid sequence that is at least 70%, at least 75%, at least 80%, at least 85%, at least 90%, at least 95%, at least 99%, or 100% identical to any one of SEQ ID NOs: 22-34; and a guide RNA comprising a nucleobase sequence that is at least 70%, at least 75%, at least 80%, at least 85%, at least 90%, at least 95%, at least 97%, at least 99%, or 100% identical to SEQ ID NO: 153. In some instances, effector protein comprises an amino acid sequence that is at least 70%, at least 75%, at least 80%, at least 85%, at least 90%, at least 95%, at least 99%, or 100% identical to SEQ ID NO: 33. In some instances, the amino acid sequence of the effector protein is at least 70%, at least 75%, at least 80%, at least 85%, at least 90%, at least 95%, at least 99%, or 100% identical to SEQ ID NO: 33.

[0719] TABLE 13 provides exemplary compositions comprising D2S effector proteins, cr/sgRNAs (crRNA or sgRNA), and tracrRNAs. Each row in TABLE 13 represents an exemplary composition. In some instances, the cr/sgRNA and/or tracrRNA comprises a nucleobase sequence of any one of the sequences as shown in TABLE 13. In some instances, the nucleobase sequence of the cr/sgRNAs is at least 65%, at least 70%, at least 75%, at least 80%, at least 85%, at least 90%, at least 95%, at least 97%, or at least 98%, at least 99%, or 100% identical to any one of the cr/sgRNA sequences present in TABLE 13. In some instances, the nucleobase sequence of the tracrRNA is at least 65%, at least 70%, at least 75%, at least 80%, at least 85%, at least 90%, at least 95%, at least 97%, or at least 98%, at least 99%, or 100% identical to any one of the tracrRNA sequences present in TABLE 13. In some instances, a D2S effector protein can comprise a sequence at least 75%, at least 80%, at least 85%, at least 90%, at least 95%, at least 98%, at least 99% or 100% identical to any one of SEQ ID NOs: 1-45, 202-293, or 728-731. In some embodiments, the compositions are used to generate a modification of a target nucleic acid. In some embodiments, the target nucleic acid comprises a PAM sequence selected from any one of the PAM sequences in TABLE 13.

[0720] TABLE 14 provides exemplary compositions comprising D2S effector proteins, cr/sgRNAs, and tracrRNAs. Each row in TABLE 14 represents an exemplary composition. In some instances, the cr/sgRNA and/or tracrRNA comprises a nucleobase sequence of any one of the sequences as shown in TABLE 14. In some instances, the nucleobase sequence of the cr/sgRNA is at least 65%, at least 70%, at least 75%, at least 80%, at least 85%, at least 90%, at least 95%, at least 97%, or at least 98%, at least 99%, or 100% identical to any one of the cr/sgRNA sequences present in TABLE 14. In some instances, the nucleobase sequence of the tracrRNA is at least 65%, at least 70%, at least 75%, at least 80%, at least 85%, at least 90%, at least 95%, at least 97%, or at least 98%, at least 99%, or 100% identical to any one of the tracrRNA sequences present in TABLE 14. In some instances, a D2S effector protein can comprise a sequence at least 75%, at least 80%, at least 85%, at least 90%, at least 95%, at least 98%, at least 99% or 100% identical to any one of SEQ ID NOs: 1-45, 202-293, or 728-731. In some embodiments, the compositions are used to generate a modification of a target nucleic acid. In some embodiments, the target nucleic acid comprises a PAM sequence selected from any one of the PAM sequences in TABLE 14.

[0721] TABLE 15 provides exemplary compositions comprising D2S effector proteins, cr/sgRNAs, and tracrRNAs. Each row in TABLE 15 represents an exemplary composition. In some instances, the cr/sgRNA and/or the tracrRNA comprises a nucleobase sequence of any one of the sequences as shown in TABLE 15. In some instances, the nucleobase sequence of the cr/sgRNA is at least 65%, at least 70%, at least 75%, at least 80%, at least 85%, at least 90%, at least 95%, at least 97%, or at least 98%, at least 99%, or 100% identical to any one of SEQ ID NOs: 463, 464, and 466. In some instances, the nucleobase sequence of the tracrRNA is at least 65%, at least 70%, at least 75%, at least 80%, at least 85%, at least 90%, at least 95%, at least 97%, or at least 98%, at least 99%, or 100% identical to SEQ ID NO: 465. In some instances, a D2S effector protein can comprise a sequence at least 75%, at least 80%, at least 85%, at least 90%, at least 95%, at least 98%, at least 99% or 100% identical to any one of SEQ ID NOs: 223, 224, or 214.

[0722] TABLE 16 provides exemplary compositions comprising D2S effector proteins, and cr/sgRNAs. Each row in TABLE 16 represents an exemplary composition. In some instances, the cr/sgRNA comprise a nucleobase sequence of any one of the sequences as shown in TABLE 16. In some instances, the nucleobase sequence of the cr/sgRNA is at least 65%, at least 70%, at least 75%, at least 80%, at least 85%, at least 90%, at least 95%, at least 97%, or at least 98%, at least 99%, or 100% identical to SEQ ID NO: 180 or 467. In some instances, a D2S effector protein can comprise a sequence at least 75%, at least 80%, at least 85%, at least 90%, at least 95%, at least 98%, at least 99% or 100% identical to any one of SEQ ID NOs: 1-45, 202-293, or 728-731. In some embodiments, the compositions are used to generate a modification of a target nucleic acid. In some embodiments, the target nucleic acid comprises a PAM sequence selected from SEQ ID NOs: 369 or 370.

[0723] TABLE 17 provides exemplary compositions comprising D2S effector proteins, and cr/sgRNAs. Each row in TABLE 17 represents an exemplary composition. In some instances, the cr/sgRNA comprise a nucleobase sequence of any one of the sequences as shown in TABLE 17. In some instances, the nucleobase sequence of the cr/sgRNA is at least 65%, at least 70%, at least 75%, at least 80%, at least 85%, at least 90%, at least 95%, at least 97%, or at least 98%, at least 99%, or 100% identical to any one of SEQ ID NOs: 468-481. In some instances, a D2S effector protein can comprise a sequence at least 75%, at least 80%, at least 85%, at least 90%, at least 95%, at least 98%, at least 99% or 100% identical to any one of SEQ ID NOs: 1-45, 202-293, or 728-731. In some embodiments, the compositions are used to generate a modification of a target nucleic acid. In some embodiments, the target nucleic acid comprises a PAM sequence selected from SEQ ID NOs: 368-371.

[0724] TABLE 18 provides exemplary compositions comprising D2S effector proteins, and cr/sgRNAs. Each row in TABLE 18 represents an exemplary composition. In some instances, the cr/sgRNA comprise a nucleobase sequence of any one of the sequences as shown in TABLE 18. In some instances, the nucleobase sequence of the cr/sgRNA is at least 65%, at least 70%, at least 75%, at least 80%, at least 85%, at least 90%, at least 95%, at least 97%, or at least 98%, at least 99%, or 100% identical to any one of the cr/sgRNA sequences present in TABLE 18. In some instances, a D2S effector protein can comprise a sequence at least 75%, at least 80%, at least 85%, at least 90%, at least 95%, at least 98%, at least 99% or 100% identical to SEQ ID NO: 23.

[0725] TABLE 19 provides exemplary compositions comprising D2S effector proteins, and cr/sgRNAs. Each row in TABLE 19 represents an exemplary composition. In some instances, the cr/sgRNA comprise a nucleobase sequence of any one of the sequences as shown in TABLE 19. In some instances, the nucleobase sequence of the cr/sgRNA is at least 65%, at least 70%, at least 75%, at least 80%, at least 85%, at least 90%, at least 95%, at least 97%, or at least 98%, at least 99%, or 100% identical to any one of the cr/sgRNA sequences present in TABLE 19. In some instances, a D2S effector protein can comprise a sequence at least 75%, at least 80%, at least 85%, at least 90%, at least 95%, at least 98%, at least 99% or 100% identical to any one of SEQ ID NOs: 1-45, 202-293, or 728-731.

[0726] TABLE 20 provides exemplary compositions comprising D2S effector proteins, cr/sgRNAs, and tracrRNAs. Each row in TABLE 20 represents an exemplary composition. In some instances, the cr/sgRNA and/or the tracrRNA comprise a nucleobase sequence of any one of the sequences as shown in TABLE 20. In some instances, the nucleobase sequence of the cr/sgRNA is at least 65%, at least 70%, at least 75%, at least 80%, at least 85%, at least 90%, at least 95%, at least 97%, or at least 98%, at least 99%, or 100% identical to any one of the cr/sgRNA sequences present in TABLE 20. In some instances, the nucleobase sequence of the tracrRNA is at least 65%, at least 70%, at least 75%, at least 80%, at least 85%, at least 90%, at least 95%, at least 97%, or at least 98%, at least 99%, or 100% identical to any one of the tracrRNA sequences present in TABLE 20. In some instances, a D2S effector protein can comprise a sequence at least 75%, at least 80%, at least 85%, at least 90%, at least 95%, at least 98%, at least 99% or 100% identical to any one of SEQ ID NOs: 1-45, 202-293, or 728-731. In some embodiments, the compositions are used to generate a modification of a target nucleic acid. In some embodiments, the target nucleic acid comprises a PAM sequence selected from SEQ ID NOs: 304, 312, 313, 315, 324 or 335.

[0727] TABLE 21 provides exemplary compositions comprising D2S effector proteins, and cr/sgRNAs. Each row in TABLE 21 represents an exemplary composition. In some instances, the cr/sgRNA comprise a nucleobase sequence of any one of the sequences as shown in TABLE 21. In some instances, the nucleobase sequence of the cr/sgRNA is at least 65%, at least 70%, at least 75%, at least 80%, at least 85%, at least 90%, at least 95%, at least 97%, or at least 98%, at least 99%, or 100% identical to any one of SEQ ID NOs: 612-615. In some instances, a D2S effector protein can comprise a sequence at least 75%, at least 80%, at least 85%, at least 90%, at least 95%, at least 98%, at least 99% or 100% identical to any one of SEQ ID NOs: 232, 233, 240, or 227. In some embodiments, the compositions are used to generate a modification of a target nucleic acid. In some embodiments, the target nucleic acid comprises a PAM sequence selected from SEQ ID NOs: 301, 318, 335, 343, 360, or 365.

[0728] TABLE 22 provides an exemplary composition comprising a D2S effector protein, and a cr/sgRNA. The row in TABLE 22 represents an exemplary composition. In some instances, the cr/sgRNA comprises a nucleobase sequence shown in TABLE 22. In some instances, the nucleobase sequence of the sgRNA is at least 65%, at least 70%, at least 75%, at least 80%, at least 85%, at least 90%, at least 95%, at least 97%, or at least 98%, at least 99%, or 100% identical to SEQ ID NO: 616. In some instances, a D2S effector protein can comprise a sequence at least 75%, at least 80%, at least 85%, at least 90%, at least 95%, at least 98%, at least 99% or 100% identical to SEQ ID NO: 228. In some embodiments, the compositions are used to generate a modification of a target nucleic acid. In some embodiments, the target nucleic acid comprises the PAM sequence of SEQ ID NO: 368.

[0729] TABLE 23 provides exemplary compositions comprising D2S effector proteins, cr/sgRNAs, and tracrRNAs. Each row in TABLE 23 represents an exemplary composition. In some instances, the cr/sgRNA and/or the tracrRNA comprise a nucleobase sequence of any one of the sequences as shown in TABLE 23. In some instances, the nucleobase sequence of the cr/sgRNA is at least 65%, at least 70%, at least 75%, at least 80%, at least 85%, at least 90%, at least 95%, at least 97%, or at least 98%, at least 99%, or 100% identical to of SEQ ID NOs: 617, 620 or 621. In some instances, the nucleobase sequence of the tracrRNA is at least 65%, at least 70%, at least 75%, at least 80%, at least 85%, at least 90%, at least 95%, at least 97%, or at least 98%, at least 99%, or 100% identical to any one of SEQ ID NOs: 618-619. In some instances, a D2S effector protein can comprise a sequence at least 75%, at least 80%, at least 85%, at least 90%, at least 95%, at least 98%, at least 99% or 100% identical to SEQ ID NO: 215. In some embodiments, the compositions are used to generate a modification of a target nucleic acid. In some embodiments, the target nucleic acid comprises the PAM sequence of SEQ ID NO: 343.

[0730] TABLE 24 provides exemplary compositions comprising D2S effector proteins, cr/sgRNAs, and tracrRNAs. Each row in TABLE 24 represents an exemplary composition. In some instances, the cr/sgRNA and/or the tracrRNA comprise a nucleobase sequence of any one of the sequences as shown in TABLE 24. In some instances, the nucleobase sequence of the cr/sgRNA is at least 65%, at least 70%, at least 75%, at least 80%, at least 85%, at least 90%, at least 95%, at least 97%, or at least 98%, at least 99%, or 100% identical to any one of SEQ ID NOs: 68 and 149. In some instances, the nucleobase sequence of the tracrRNA is at least 65%, at least 70%, at least 75%, at least 80%, at least 85%, at least 90%, at least 95%, at least 97%, or at least 98%, at least 99%, or 100% identical to SEQ ID NO: 120. In some instances, a D2S effector protein can comprise a sequence at least 75%, at least 80%, at least 85%, at least 90%, at least 95%, at least 98%, at least 99% or 100% identical to SEQ ID NO: 23. In some embodiments, the compositions are used to generate a modification of a target nucleic acid. In some embodiments, the target nucleic acid comprises a PAM sequence selected from SEQ ID NOs: 325-328.

[0731] TABLE 25 provides exemplary compositions comprising D2S effector proteins, sgRNAs, linker sequences, repeat sequences, spacer sequences, and tracrRNAs. Each row in TABLE 25 represents an exemplary composition. In some instances, the cr/sgRNA and/or the tracrRNA comprise a nucleobase sequence of any one of the sequences as shown in TABLE 25. In some instances, the linker sequence, the repeat sequence, and/or the spacer sequence comprise a nucleobase sequence of any one of the sequences as shown in TABLE 25. In some instances, the nucleobase sequence of the cr/sgRNA is at least 65%, at least 70%, at least 75%, at least 80%, at least 85%, at least 90%, at least 95%, at least 97%, or at least 98%, at least 99%, or 100% identical to any one of the cr/sgRNA sequences present in TABLE 25. In some instances, the nucleobase sequence of the tracrRNA is at least 65%, at least 70%, at least 75%, at least 80%, at least 85%, at least 90%, at least 95%, at least 97%, or at least 98%, at least 99%, or 100% identical to any one of the tracrRNA sequences present in TABLE 25. In some instances, the nucleobase sequence of the linker sequence is at least 65%, at least 70%, at least 75%, at least 80%, at least 85%, at least 90%, at least 95%, at least 97%, or at least 98%, at least 99%, or 100% identical to SEQ ID NO: 623. In some instances, the nucleobase sequence of the repeat sequence is at least 65%, at least 70%, at least 75%, at least 80%, at least 85%, at least 90%, at least 95%, at least 97%, or at least 98%, at least 99%, or 100% identical to any one of the repeat sequences present in TABLE 25. In some instances, the nucleobase sequence of the spacer sequence is at least 65%, at least 70%, at least 75%, at least 80%, at least 85%, at least 90%, at least 95%, at least 97%, or at least 98%, at least 99%, or 100% identical to any one of the spacer sequences present in TABLE 25. In some instances, a D2S effector protein can comprise a sequence at least 75%, at least 80%, at least 85%, at least 90%, at least 95%, at least 98%, at least 99% or 100% identical to SEQ ID NO: 23.

[0732] TABLE 26 provides exemplary spacer sequences. In some instances, the spacer sequence comprises a nucleobase sequence shown in TABLE 26. In some instances, the nucleobase sequence of the spacer sequence is at least 65%, at least 70%, at least 75%, at least 80%, at least 85%, at least 90%, at least 95%, at least 97%, or at least 98%, at least 99%, or 100% identical to the spacer sequence present in TABLE 26.

[0733] TABLE 28 provides exemplary spacer sequences. In some instances, the spacer sequence comprises a nucleobase sequence shown in TABLE 28. In some instances, the nucleobase sequence of the spacer sequence is at least 65%, at least 70%, at least 75%, at least 80%, at least 85%, at least 90%, at least 95%, at least 97%, or at least 98%, at least 99%, or 100% identical to the spacer sequence present in TABLE 28.

[0734] TABLE 34 provides exemplary compositions comprising D2S effector proteins and sgRNAs with and without spacer sequences. Each row in TABLE 34 represents an exemplary composition. In some instances, the nucleobase sequence of a guide RNA is at least 65%, at least 70%, at least 75%, at least 80%, at least 85%, at least 90%, at least 95%, at least 97%, or at least 98%, at least 99%, or 100% identical to any one of the guide RNA (with or without a spacer) sequences present in TABLE 34.

### Effector Protein-sgRNA Complexes

[0735] In some instances, compositions disclosed herein comprises an effector protein comprising an amino acid sequence that is at least 70%, at least 75%, at least 80%, at least 85%, at least 90%, at least 95%, at least 99%, or 100% identical to any one of SEQ ID NOs: 22-34; and a guide RNA comprising a nucleobase sequence that is at least 70%, at least 75%, at least 80%, at least 85%, at least 90%, at least 95%, at least 97%, at least 99%, or 100% identical to SEQ ID NO: 149. In some instances, effector protein comprises an amino acid sequence that is at least 70%, at least 75%, at least 80%, at least 85%, at least 90%, at least 95%, at least 99%, or 100% identical to SEQ ID NO: 22. In some instances, the amino acid sequence of the effector protein is at least 70%, at least 75%, at least 80%, at least 85%, at least 90%, at least 95%, at least 99%, or 100% identical to SEQ ID NO: 22.

[0736] In some instances, compositions disclosed herein comprises an effector protein comprising an amino acid sequence that is at least 70%, at least 75%, at least 80%, at least 85%, at least 90%, at least 95%, at least 99%, or 100% identical to any one of SEQ ID NOs: 22-34; and a guide RNA comprising a nucleobase sequence that is at least 70%, at least 75%, at least 80%, at least 85%, at least 90%, at least 95%, at least 97%, at least 99%, or 100% identical to SEQ ID NO: 149. In some instances, effector protein comprises an amino acid sequence that is at least 70%, at least 75%, at least 80%, at least 85%, at least 90%, at least 95%, at least 99%, or 100% identical to SEQ ID NO: 23. In some instances, the amino acid sequence of the effector protein is at least 70%, at least 75%, at least 80%, at least 85%, at least 90%, at least 95%, at least 99%, or 100% identical to SEQ ID NO: 23.

[0737] In some instances, compositions disclosed herein comprises an effector protein comprising an amino acid sequence that is at least 70%, at least 75%, at least 80%, at least 85%, at least 90%, at least 95%, at least 99%, or 100% identical to any one of SEQ ID NOs: 22-34; and a guide RNA comprising a nucleobase sequence that is at least 70%, at least 75%, at least 80%, at least 85%, at least 90%, at least 95%, at least 97%, at least 99%, or 100% identical to SEQ ID NO: 150. In some instances, effector protein comprises an amino acid sequence that is at least 70%, at least 75%, at least 80%, at least 85%, at least 90%, at least 95%, at least 99%, or 100% identical to SEQ ID NO: 24. In some instances, the amino acid sequence of the effector protein is at least 70%, at least 75%, at least 80%, at least 85%, at least 90%, at least 95%, at least 99%, or 100% identical to SEQ ID NO: 24.

[0738] In some instances, compositions disclosed herein comprises an effector protein comprising an amino acid sequence that is at least 70%, at least 75%, at least 80%, at least 85%, at least 90%, at least 95%, at least 99%, or 100% identical to any one of SEQ ID NOs: 22-34; and a guide RNA comprising a nucleobase sequence that is at least 70%, at least 75%, at least 80%, at least 85%, at least 90%, at least 95%, at least 97%, at least 99%, or 100% identical to SEQ ID NO: 151. In some instances, effector protein comprises an amino acid sequence that is at least 70%, at least 75%, at least 80%, at least 85%, at least 90%, at least 95%, at least 99%, or 100% identical to SEQ ID NO: 25. In some instances, the amino acid sequence of the effector protein is at least 70%, at least 75%, at least 80%, at least 85%, at least 90%, at least 95%, at least 99%, or 100% identical to SEQ ID NO: 25.

[0739] In some instances, compositions disclosed herein comprises an effector protein comprising an amino acid sequence that is at least 70%, at least 75%, at least 80%, at least 85%, at least 90%, at least 95%, at least 99%, or 100% identical to any one of SEQ ID NOs: 22-34; and a guide RNA comprising a nucleobase sequence that is at least 70%, at least 75%, at least 80%, at least 85%, at least 90%, at least 95%, at least 97%, at least 99%, or 100% identical to SEQ ID NO: 149. In some instances, effector protein comprises an amino acid sequence that is at least 70%, at least 75%, at least 80%, at least 85%, at least 90%, at least 95%, at least 99%, or 100% identical to SEQ ID NO: 26. In some instances, the amino acid sequence of the effector protein is at least 70%, at least 75%, at least 80%, at least 85%, at least 90%, at least 95%, at least 99%, or 100% identical to SEQ ID NO: 26.

[0740] In some instances, compositions disclosed herein comprises an effector protein comprising an amino acid sequence that is at least 70%, at least 75%, at least 80%, at least 85%, at least 90%, at least 95%, at least 99%, or 100% identical to any one of SEQ ID NOs: 22-34; and a guide RNA comprising a nucleobase sequence that is at least 70%, at least 75%, at least 80%, at least 85%, at least 90%, at least 95%, at least 97%, at least 99%, or 100% identical to SEQ ID NO: 150. In some instances, effector protein comprises an amino acid sequence that is at least 70%, at least 75%, at least 80%, at least 85%, at least 90%, at least 95%, at least 99%, or 100% identical to SEQ ID NO: 28. In some instances, the amino acid sequence of the effector protein is at least 70%, at least 75%, at least 80%, at least 85%, at least 90%, at least 95%, at least 99%, or 100% identical to SEQ ID NO: 28.

[0741] In some instances, compositions disclosed herein comprises an effector protein comprising an amino acid sequence that is at least 70%, at least 75%, at least 80%, at least 85%, at least 90%, at least 95%, at least 99%, or 100% identical to any one of SEQ ID NOs: 22-34; and a guide RNA comprising a nucleobase sequence that is at least 70%, at least 75%, at least 80%, at least 85%, at least 90%, at least 95%, at least 97%, at least 99%, or 100% identical to SEQ ID NO: 150. In some instances, effector protein comprises an amino acid sequence that is at least 70%, at least 75%, at least 80%, at least 85%, at least 90%, at least 95%, at least 99%, or 100% identical to SEQ ID NO: 29. In some instances, the amino acid sequence of the effector protein is at least 70%, at least 75%, at least 80%, at least 85%, at least 90%, at least 95%, at least 99%, or 100% identical to SEQ ID NO: 29.

[0742] In some instances, compositions disclosed herein comprises an effector protein comprising an amino acid sequence that is at least 70%, at least 75%, at least 80%, at least 85%, at least 90%, at least 95%, at least 99%, or 100% identical to any one of SEQ ID NOs: 22-34; and a guide RNA comprising a nucleobase sequence that is at least 70%, at least 75%, at least 80%, at least 85%, at least 90%, at least 95%, at least 97%, at least 99%, or 100% identical to SEQ ID NO: 152. In some instances, effector protein comprises an amino acid sequence that is at least 70%, at least 75%, at least 80%, at least 85%, at least 90%, at least 95%, at least 99%, or 100% identical to SEQ ID NO: 30. In some instances, the amino acid sequence of the effector protein is at least 70%, at least 75%, at least 80%, at least 85%, at least 90%, at least 95%, at least 99%, or 100% identical to SEQ ID NO: 30.

[0743] In some instances, compositions disclosed herein comprises an effector protein comprising an amino acid sequence that is at least 70%, at least 75%, at least 80%, at least 85%, at least 90%, at least 95%, at least 99%, or 100% identical to any one of SEQ ID NOs: 22-34; and a guide RNA comprising a nucleobase sequence that is at least 70%, at least 75%, at least 80%, at least 85%, at least 90%, at least 95%, at least 97%, at least 99%, or 100% identical to SEQ ID NO: 151. In some instances, effector protein comprises an amino acid sequence that is at least 70%, at least 75%, at least 80%, at least 85%, at least 90%, at least 95%, at least 99%, or 100% identical to SEQ ID NO: 31. In some instances, the amino acid sequence of the effector protein is at least 70%, at least 75%, at least 80%, at least 85%, at least 90%, at least 95%, at least 99%, or 100% identical to SEQ ID NO: 31.

[0744] In some instances, compositions disclosed herein comprises an effector protein comprising an amino acid sequence that is at least 70%, at least 75%, at least 80%, at least 85%, at least 90%, at least 95%, at least 99%, or 100% identical to any one of SEQ ID NOs: 22-34; and a guide RNA comprising a nucleobase sequence that is at least 70%, at least 75%, at least 80%, at least 85%, at least 90%, at least 95%, at least 97%, at least 99%, or 100% identical to SEQ ID NO: 152. In some instances, effector protein comprises an amino acid sequence that is at least 70%, at least 75%, at least 80%, at least 85%, at least 90%, at least 95%, at least 99%, or 100% identical to SEQ ID NO: 32. In some instances, the amino acid sequence of the effector protein is at least 70%, at least 75%, at least 80%, at least 85%, at least 90%, at least 95%, at least 99%, or 100% identical to SEQ ID NO: 32.

[0745] In some instances, compositions disclosed herein comprises an effector protein comprising an amino acid sequence that is at least 70%, at least 75%, at least 80%, at least 85%, at least 90%, at least 95%, at least 99%, or 100% identical to any one of SEQ ID NOs: 22-34; and a guide RNA comprising a nucleobase sequence that is at least 70%, at least 75%, at least 80%, at least 85%, at least 90%, at least 95%, at least 97%, at least 99%, or 100% identical to SEQ ID NO: 153. In some instances, effector protein comprises an amino acid sequence that is at least 70%, at least 75%, at least 80%, at least 85%, at least 90%, at least 95%, at least 99%, or 100% identical to SEQ ID NO: 33. In some instances, the amino acid sequence of the effector protein is at least 70%, at least 75%, at least 80%, at least 85%, at least 90%, at least 95%, at least 99%, or 100% identical to SEQ ID NO: 33.

### Pooling Guide Nucleic Acids

[0746] In some instances, compositions, systems or methods provided herein comprise a pool of guide nucleic acids. In some instances, the pool of guide nucleic acids were tiled against a target nucleic acid, e.g., the genomic locus of interest or uses thereof. In some instances, a guide nucleic acid is selected from a group of guide nucleic acids that have been tiled against a nucleic acid sequence of a genomic locus of interest. The genomic locus of interest may belong to a viral genome, a bacterial genome, or a mammalian genome. Non-limiting examples of viral genomes are an HPV genome, an HIV genome, an influenza genome, or a coronavirus genome. Often, these guide nucleic acids are pooled for detecting a target nucleic acid in a single assay. Pooling of guide nucleic acids may ensure broad spectrum identification, or broad coverage, of a target species within a single reaction. This may be particularly helpful in diseases or indications, like sepsis, that may be caused by multiple organisms. The pool of guide nucleic acids may enhance the detection of a target nucleic using systems of methods described herein relative to detection with a single guide nucleic acid. The pool of guide nucleic acids may ensure broad coverage of the target nucleic acid within a single reaction using the methods described herein. In some instances, the pool of guide nucleic acids are collectively complementary to at least 50%, at least 55%, at least 60%, at least 65%, at least 70%, at least 75%, at least 80%, at least 85%, at least 90%, at least 95% or 100% of the target nucleic acid. In some instances, at least a portion of the guide nucleic acids of the pool overlap in sequence. In some instances, at least a portion of the guide nucleic acids of the pool do not overlap in sequence. In some cases, the pool of guide nucleic acids comprises at least 2, at least 3, at least 4, at least 5, or at least 6 guide nucleic acids targeting different sequences of a target nucleic acid.

### Intermediary Nucleic Acids

[0747] A guide nucleic acid may comprise or be coupled to an intermediary nucleic acid. The intermediary nucleic acid may also be referred to as an intermediary RNA, although it may comprise deoxyribonucleosides in addition to ribonucleosides. The intermediary RNA may be separate from, but forms a complex with a crRNA to form a discrete gRNA system. The intermediary RNA may be linked to a crRNA to form a composite gRNA. A D2S effector protein may bind a crRNA and an intermediary RNA. In some cases, the crRNA and the intermediary RNA are provided as a single nucleic acid (e.g., covalently linked). In some instances, the crRNA and the intermediary RNA are separate polynucleotides (e.g., a discrete gRNA system). An intermediary RNA may comprise a repeat hybridization region and a hairpin region. The repeat hybridization region may hybridize to all or part of the sequence of the repeat of a crRNA. The repeat hybridization region may be positioned 3′ of the hairpin region. The hairpin region may comprise a first sequence, a second sequence that is reverse complementary to the first sequence, and a stem-loop linking the first sequence and the second sequence.

[0748] The D2S effector protein (RNP) complex may comprise a D2S effector protein complexed with a guide nucleic acid (e.g., a crRNA) and an intermediary RNA. Sometimes, a guide nucleic acid comprises a crRNA and an intermediary RNA (e.g., the crRNA and intermediary RNA are provided as a single nucleic acid molecule). A composition may comprise a crRNA, an intermediary RNA, a D2S effector protein, and a detector nucleic acid.

[0749] In some instances, the length of intermediary RNAs is not greater than 50, 56, 68, 71, 73, 95, or 105 linked nucleosides. In some instances, the length of an intermediary RNA is about 30 to about 120 linked nucleosides. In some instances, the length of an intermediary RNA is about 50 to about 105, about 50 to about 95, about 50 to about 73, about 50 to about 71, about 50 to about 68, or about 50 to about 56 linked nucleosides. In some instances, the length of an intermediary RNA is 56 to 105 linked nucleosides, from 56 to 105 linked nucleosides, 68 to 105 linked nucleosides, 71 to 105 linked nucleosides, 73 to 105 linked nucleosides, or 95 to 105 linked nucleosides. In some instances, the length of an intermediary RNA is 40 to 60 nucleotides. In some instances, the length of the intermediary RNA is 50, 56, 68, 71, 73, 95, or 105 linked nucleosides. In some instances, the length of the intermediary RNA is 50 nucleotides.

[0750] An exemplary intermediary RNA may comprise, from 5′ to 3′, a 5′ region, a hairpin region, a repeat hybridization region, and a 3′ region. In some cases, the 5′ region may hybridize to the 3′ region. In some instances, the 5′ region does not hybridize to the 3′ region. In some cases, the 3′ region is covalently linked to the crRNA (e.g., through a phosphodiester bond). In some instances, an intermediary RNA may comprise an un-hybridized region at the 3′ end of the intermediary RNA. The un-hybridized region may have a length of about 1, about 2, about 3, about 4, about 5, about 6, about 7, about 8, about 9, about 10, about 12, about 14, about 16, about 18, or about 20 linked nucleosides. In some instances, the length of the un-hybridized region is 0 to 20 linked nucleosides.

### VII. Vectors and Multiplexed Expression Vectors

[0751] In some instances, compositions and systems provided herein comprise a vector system encoding a polypeptide (e.g., an effector protein) described herein. In some instances, compositions and systems provided herein comprise a vector system encoding a guide nucleic acid (e.g., crRNA, tracrRNA, or sgRNA) described herein. In some instances, compositions and systems provided herein comprise a multi-vector system encoding an effector protein and a guide nucleic acid described herein, wherein the guide nucleic acid and the effector protein are encoded by the same or different vectors. In some instances, the engineered guide and the engineered effector protein are encoded by different vectors of the system. In some embodiments, a nucleic acid encoding a polypeptide (e.g., an effector protein) comprises an expression vector. In some embodiments, a nucleic acid encoding a polypeptide is a messenger RNA. In some embodiments, an expression vector comprises or encodes an engineered guide nucleic acid. In some cases, the expression vector encodes the crRNA or sgRNA.

[0752] In some instances, a vector may encode one or more engineered effector proteins. In some instances, a vector may encode 1, 2, 3, 4, 5, 6, 7, 8, 9, 10, 11, 12, 13, 14, 15, 16, 17, 18, 19, 20, 21, 22, 23, 24, 25, 26, 27, 28, 29, 30, 31, 32, 33, 34, 35, 36, 37, 38, 39, 40, 41, 42, 43, 44, or 45 engineered effector proteins. In some instances, a vector can encode one or more engineered effector proteins comprising an amino acid sequence of any one of SEQ ID NOs: 1-45. In some instances, a vector can encode one or more engineered effector proteins comprising an amino acid sequence of any one of SEQ ID NOs: 1-45, 202-293, or 728-731. In some instances, a vector can encode one or more engineered effector proteins comprising an amino acid sequence with at least 75%, 80%, 85%, 90%, 95% or 98% sequence identity to any one of SEQ ID NOs: 1-45. In some instances, a vector can encode one or more engineered effector proteins comprising an amino acid sequence with at least 75%, 80%, 85%, 90%, 95% or 98% sequence identity to any one of SEQ ID NOs: 1-45, 202-293, or 728-731.

[0753] In some instances, a vector may encode one or more guide nucleic acids. In some instances, a vector may encode 1, 2, 3, 4, 5, 6, 7, 8, 9, 10, 11, 12, 13, 14, 15, 16, 17, 18, 19, 20, 21, 22, 23, 24, 25, 26, 27, 28, 29, 30, 31, 32, 33, 34, 35, 36, 37, 38, 39, 40, 41, 42, 43, 44, or 45 different guide nucleic acids. In some instances, a vector can encode one or more guide nucleic acids comprising a crRNA sequence of any one of SEQ ID NOs: 46-90. In some instances, a vector can encode one or more guide nucleic acids comprising a crRNA sequence with at least 75%, 80%, 85%, 90%, 95% or 98% sequence identity to any one of SEQ ID NOs: 46-90. In some instances, a vector can encode one or more guide nucleic acids comprising a crRNA sequence of any one of SEQ ID NOs: 91-148. In some instances, a vector can encode one or more guide nucleic acids comprising a tracrRNA sequence with at least 75%, 80%, 85%, 90%, 95% or 98% sequence identity to any one of SEQ ID NOs: 91-148. In some instances, the tracrRNA and the crRNA may be linked into a single guide RNA. In some instances, a vector can encode one or more guide nucleic acids comprising a nucleobase any one of SEQ ID NOs: 149-153. In some instances, a vector can encode one or more guide nucleic acids comprising a guide sequence with at least 75%, 80%, 85%, 90%, 95% or 98% sequence identity to any one of SEQ ID NOs: 149-153.

### Lipid Particles

[0754] In some instances, compositions and systems provided herein comprise a lipid particle. In some embodiments, a lipid particle is a lipid nanoparticle (LNP). In some embodiments, a lipid or a lipid nanoparticle can encapsulate an expression vector. In some embodiments, a lipid or a lipid nanoparticle can encapsulate the D2S effector protein, the sgRNA or crRNA, the nucleic acid encoding the D2S effector protein and/or the DNA molecule encoding the sgRNA or crRNA. LNPs are a non-viral delivery system for gene therapy. LNPs are effective for delivery of nucleic acids. Beneficial properties of LNP include ease of manufacture, low cytotoxicity and immunogenicity, high efficiency of nucleic acid encapsulation and cell transfection, multi-dosing capabilities and flexibility of design (Kulkarni et al., (2018) Nucleic Acid Therapeutics, 28(3):146-157). In some cases, a method can comprise contacting a cell with an expression vector. In some cases, contacting can comprise electroporation, lipofection, or lipid nanoparticle (LNP) delivery of an expression vector.

### Viral Vectors

[0755] An expression vector can be a viral vector. In some embodiments, a viral vector comprises a nucleic acid to be delivered into a host cell via a recombinantly produced virus or viral particle. The nucleic acid may be single-stranded or double stranded, linear or circular, segmented or non-segmented. The nucleic acid may comprise DNA, RNA, or a combination thereof. In some embodiments, the expression vector is an adeno-associated viral vector. There are a variety of viral vectors that are associated with various types of viruses, including but not limited to retroviruses (e.g., lentiviruses and γ-retroviruses), adenoviruses, arenaviruses, alphaviruses, adeno-associated viruses (AAVs), baculoviruses, vaccinia viruses, herpes simplex viruses and poxviruses. A viral vector provided herein can be derived from or based on any such virus. Often the viral vectors provided herein are an adeno-associated viral vector (AAV vector). Generally, an AAV vector has two inverted terminal repeats (ITRs). According, in some embodiments, the viral vector provided herein comprises two inverted terminal repeats of AAV. The DNA sequence in between the ITRs of an AAV vector provided herein may be referred to herein as the sequence encoding the genome editing tools. These genome editing tools can include, but are not limited to, an effector protein, effector protein modifications (e.g., nuclear localization signal (NLS), polyA tail), guide nucleic acid(s), respective promoter(s), and a donor nucleic acid, or combinations thereof. In some embodiments, a nuclear localization signal comprises an entity (e.g., peptide) that facilitates localization of a nucleic acid, protein, or small molecule to the nucleus, when present in a cell that contains a nuclear compartment.

[0756] In general, viral vectors provided herein comprise at least one promotor or a combination of promoters driving expression or transcription of one or more genome editing tools described herein. In some embodiments, the length of the promoter is less than about 500, less than about 400, or less than about 300 linked nucleotides. In some embodiments, the length of the promoter is at least 100 linked nucleotides. Non-limiting examples of promoters include CMV, EF1a, RPBSA, hPGK, EFS, SV40, PGK1, Ubc, human beta actin promoter, CAG, TRE, UAS, Ac5, Polyhedrin, CaMKIIa, GAL1, H1, TEF1, GDS, ADH1, CaMV35S, Ubi, U6, MNDU3, and MSCV. In some embodiments, the promoter is an inducible promoter that only drives expression of its corresponding gene when a signal is present, e.g., a hormone, a small molecule, a peptide. Non-limiting examples of inducible promoters are the T7 RNA polymerase promoter, the T3 RNA polymerase promoter, the Isopropyl-beta-D-thiogalactopyranoside (IPTG)-regulated promoter, a lactose induced promoter, a heat shock promoter, a tetracycline-regulated promoter (tetracycline-inducible or tetracycline-repressible), a steroid regulated promoter, a metal-regulated promoter, and an estrogen receptor-regulated promoter. In some embodiments, the promoter is an activation-inducible promoter, such as a CD69 promoter, as described further in Kulemzin et al., (2019), BMC Med Genomics, 12:44.

[0757] In some embodiments, the coding region of the AAV vector forms an intramolecular double-stranded DNA template thereby generating an AAV vector that is a self-complementary AAV (scAAV) vector. In general, the sequence encoding the genome editing tools of an scAAV vector has a length of about 2 kb to about 3 kb. The scAAV vector can comprise nucleotide sequences encoding an effector protein, providing guide nucleic acids described herein, and a donor nucleic acid described herein. In some embodiments, the AAV vector provided herein is a self-inactivating AAV vector.

[0758] In some embodiments, an AAV vector provided herein comprises a modification, such as an insertion, deletion, chemical alteration, or synthetic modification, relative to a wild-type AAV vector.

[0759] In some embodiments, the viral particle that delivers the viral vector described herein is an AAV. AAVs are characterized by their serotype. Non-limiting examples of AAV serotypes are AAV1, AAV2, AAV3, AAV4, AAV5, AAV6, AAV7, AAV8, AAV9, AAV10, AAV11, AAV12, scAAV, AAV-rh10, chimeric or hybrid AAV, or any combination, derivative, or variant thereof

### Producing AAV Particles

[0760] The AAV particles described herein can be referred to as recombinant AAV (rAAV). Often, rAAV particles are generated by transfecting AAV producing cells with an AAV-containing plasmid carrying the sequence encoding the genome editing tools, a plasmid that carries viral encoding regions, i.e., Rep and Cap gene regions; and a plasmid that provides the helper genes such as E1A, E1B, E2A, E4ORF6 and VA. In some embodiments, the AAV producing cells are mammalian cells. In some embodiments, host cells for rAAV viral particle production are mammalian cells. In some embodiments, a mammalian cell for rAAV viral particle production is a COS cell, a HEK293T cell, a HeLa cell, a KB cell, a derivative thereof, or a combination thereof. In some embodiments, rAAV virus particles can be produced in the mammalian cell culture system by providing the rAAV plasmid to the mammalian cell. In some embodiments, producing rAAV virus particles in a mammalian cell can comprise transfecting vectors that express the rep protein, the capsid protein, and the gene-of-interest expression construct flanked by the ITR sequence on the 5′ and 3′ ends. Methods of such processes are provided in, for example, Naso et al., BioDrugs, 2017 August; 31(4):317-334 and Benskey et al., (2019), Methods Mol Biol., 1937:3-26, each of which is incorporated by reference in their entireties.

[0761] In some embodiments, rAAV is produced in a non-mammalian cell. In some embodiments, rAAV is produced in an insect cell. In some embodiments, an insect cell for producing rAAV viral particles comprises a Sf9 cell. In some embodiments, production of rAAV virus particles in insect cells can comprise baculovirus. In some embodiments, production of rAAV virus particles in insect cells can comprise infecting the insect cells with three recombinant baculoviruses, one carrying the cap gene, one carrying the rep gene, and one carrying the gene-of-interest expression construct enclosed by an ITR on both the 5′ and 3′ end. In some embodiments, rAAV virus particles are produced by the One Bac system. In some embodiments, rAAV virus particles can be produced by the Two Bac system. In some embodiments, in the Two Bac system, the rep gene and the cap gene of the AAV is integrated into one baculovirus virus genome, and the ITR sequence and the gene-of-interest expression construct is integrated into another baculovirus virus genome. In some embodiments, in the One Bac system, an insect cell line that expresses both the rep protein and the capsid protein is established and infected with a baculovirus virus integrated with the ITR sequence and the gene-of-interest expression construct. Details of such processes are provided in, for example, Smith et. al., (1983), Mol. Cell. Biol., 3(12):2156-65; Urabe et al., (2002), Hum. Gene. Ther., 1; 13(16):1935-43; and Benskey et al., (2019), Methods Mol Biol., 1937:3-26, each of which is incorporated by reference in its entirety.

### VIII. Modifications

[0762] Polypeptides (e.g., effector proteins) and nucleic acids (e.g., engineered guide nucleic acids) described herein can be further modified as described throughout and as further described herein.

[0763] Examples are modifications of interest that do not alter primary sequence, including chemical derivatization of polypeptides, e.g., acylation, acetylation, carboxylation, amidation, etc. Also included are modifications of glycosylation, e.g. those made by modifying the glycosylation patterns of a polypeptide during its synthesis and processing or in further processing steps; e.g. by exposing the polypeptide to enzymes which affect glycosylation, such as mammalian glycosylating or deglycosylating enzymes. Also embraced are sequences that have phosphorylated amino acid residues, e.g. phosphotyrosine, phosphoserine, or phosphothreonine.

[0764] Modifications disclosed herein can also include modification of described polypeptides and/or engineered guide nucleic acids through any suitable method, such as molecular biological techniques and/or synthetic chemistry, to improve their resistance to proteolytic degradation, to change the target sequence specificity, to optimize solubility properties, to alter protein activity (e.g., transcription modulatory activity, enzymatic activity, etc.) or to render them more suitable. Analogs of such polypeptides include those containing residues other than naturally occurring L-amino acids, e.g. D-amino acids or non-naturally occurring synthetic amino acids. D-amino acids may be substituted for some or all of the amino acid residues. Modifications can also include modifications with non-naturally occurring unnatural amino acids. The particular sequence and the manner of preparation will be determined by convenience, economics, purity required, and the like.

[0765] Modifications can further include the introduction of various groups to polypeptides and/or engineered guide nucleic acids described herein. For example, groups can be introduced during synthesis or during expression of a polypeptide (e.g., a effector protein), which allow for linking to other molecules or to a surface. Thus, e.g., cysteines can be used to make thioethers, histidines for linking to a metal ion complex, carboxyl groups for forming amides or esters, amino groups for forming amides, and the like.

[0766] Modifications can further include modification of nucleic acids described herein (e.g., engineered guide nucleic acids) to provide the nucleic acid with a new or enhanced feature, such as improved stability. Such modifications of a nucleic acid include a base modification, a backbone modification, a sugar modification, or combinations thereof, of one or more nucleotides, nucleosides, or nucleobases in a nucleic acid.

[0767] In some embodiments, nucleic acids (e.g., engineered guide nucleic acids) described herein comprise one or more modifications comprising: 2′O-methyl modified nucleotides, 2′ Fluoro modified nucleotides; locked nucleic acid (LNA) modified nucleotides; peptide nucleic acid (PNA) modified nucleotides; nucleotides with phosphorothioate linkages; a 5′ cap (e.g., a 7-methylguanylate cap (m7G)), phosphorothioates, chiral phosphorothioates, phosphorodithioates, phosphotriesters, aminoalkylphosphotriesters, methyl and other alkyl phosphonates including 3′-alkylene phosphonates, 5′-alkylene phosphonates and chiral phosphonates, phosphinates, phosphoramidates including 3′-amino phosphoramidate and aminoalkyl phosphoramidates, phosphorodiamidates, thionophosphor amidates, thionoalkylphosphonates, thionoalkylphosphotriesters, selenophosphates and boranophosphates having normal 3′-5′ linkages, 2′-5′ linked analogs of these, and those having inverted polarity wherein one or more internucleotide linkages is a 3′ to 3′, 5′ to 5′ or 2′ to 2′ linkage; phosphorothioate and/or heteroatom internucleoside linkages, such as —CH2-NH—O—CH2-, —CH2-N(CH3)-O—CH2- (known as a methylene (methylimino) or MMI backbone), —CH2-O—N(CH3)-CH2-, —CH2-N(CH3)-N(CH3)-CH2- and —O—N(CH3)-CH2-CH2- (wherein the native phosphodiester internucleotide linkage is represented as —O—P(═O)(OH)—O—CH2-); morpholino linkages (formed in part from the sugar portion of a nucleoside); morpholino backbones; phosphorodiamidate or other non-phosphodiester internucleoside linkages; siloxane backbones; sulfide, sulfoxide and sulfone backbones; formacetyl and thioformacetyl backbones; methylene formacetyl and thioformacetyl backbones; riboacetyl backbones; alkene containing backbones; sulfamate backbones; methyleneimino and methylenehydrazino backbones; sulfonate and sulfonamide backbones; amide backbones; other backbone modifications having mixed N, O, S and CH2 component parts; and combinations thereof.

### IX. Systems

[0768] Disclosed herein, in some aspects, are systems for modifying a nucleic acid, comprising any one of the D2S effector proteins described herein, or a multimeric complex thereof. Systems may have components that can be used to detect, modify, or edit a target nucleic acid, wherein such components include, separately or in combination as a composition, a D2S effector protein, a guide nucleic acid, or other reagent or molecule described herein. Systems may be used to modify the activity or expression of a target nucleic acid. In some instances, systems comprise a D2S effector protein described herein, a reagent, support medium, or a combination thereof. In some instances, the D2S effector protein comprises a D2S effector protein, or a fusion protein thereof, described herein. In some instances, the D2S effector protein comprises an amino acid sequence that is at least 70%, at least 75%, at least 80%, at least 85%, at least 90%, at least 95%, or 100% identical to any one of SEQ ID NOs: 1-45. In some instances, the D2S effector protein comprises an amino acid sequence that is at least 70%, at least 75%, at least 80%, at least 85%, at least 90%, at least 95%, or 100% identical to any one of SEQ ID NOs: 1-45, 202-293, or 728-731. In some instances, the amino acid sequence of the D2S effector protein is at least 70%, at least 75%, at least 80%, at least 85%, at least 90%, at least 95%, or 100% identical to any one of SEQ ID NOs: 1-45. In some instances, the amino acid sequence of the D2S effector protein is at least 70%, at least 75%, at least 80%, at least 85%, at least 90%, at least 95%, or 100% identical to any one of SEQ ID NOs: 1-45, 202-293, or 728-731. Such systems may be used for detecting the presence of a target nucleic acid associated with or causative of a disease, such as cancer, a genetic disorder, or an infection. In some instances, such methods and systems are useful for phenotyping, genotyping, or determining ancestry. Unless specified otherwise, systems include kits and may be referred to as kits. Unless specified otherwise, systems include devices and may also be referred to as devices. Systems described herein may be provided in the form of a companion diagnostic assay or device, a point-of-care assay or device, or an over-the-counter diagnostic assay/device.

[0769] Systems described herein, in some aspects, are for detecting or modifying a target sequence of a target nucleic acid comprising: a) a polypeptide (e.g., an effector protein) described herein, or a nucleic acid encoding the polypeptide; and b) an engineered guide nucleic acid. In some cases, the polypeptide comprises an amino acid sequence that is at least 85%, at least 90%, at least 95%, or at least 100% identical to SEQ ID NO: 23. In some cases, the engineered guide nucleic acid comprises a sequence that is at least 60%, at least 65%, at least 70%, at least 75%, at least 80%, at least 85%, at least 90%, at least 95%, or at least 100% identical to 624, 628, 630, 634, 638, 641, 643, and 645. In some cases, the target nucleic acid comprises a protospacer adjacent motif (PAM) selected from SEQ ID NOS: 156-159, 325-328, or 343. In some embodiments, the PAM is required for the polypeptide and engineered guide nucleic acid to detect or modify the target sequence. In some cases, the polypeptide comprises a mutation that reduces a catalytic activity of the polypeptide relative to the polypeptide that is 100% identical to SEQ ID NO: 23. In some cases, the polypeptide is capable of binding to the target nucleic acid but has reduced or no nuclease activity on the target nucleic acid. In some cases, the polypeptide is a nuclease that is capable of cleaving at least one strand of a target nucleic acid. In some cases, the system comprises a fusion partner protein fused to the polypeptide. In some cases, the system comprises at least one of a detection reagent and an amplification reagent. In some cases, the detection reagent is selected from: a reporter nucleic acid, a detection moiety, an additional polypeptide, and a combination thereof. In some cases, the at least one amplification reagent is selected from: the group consisting of a primer, an polymerase, a dNTP, an rNTP, and combinations thereof. In some cases, the target nucleic acid comprises a protospacer adjacent motif (PAM) selected from any one of SEQ ID NOS: 156-159, 325-328, and 369, and the PAM is required for the polypeptide and engineered guide nucleic acid to detect or modify the target sequence. In some cases, the target nucleic acid comprises a PAM sequence of SEQ ID NO: 369. Also described herein are compositions comprising a polypeptide and an engineered guide nucleic acid. In some embodiments, the polypeptide comprises an amino acid sequence that is at least at least 80%, at least 85%, at least 90%, at least 95%, or at least 100% identical to SEQ ID NO: 23. In some embodiments, the engineered guide nucleic acid comprises a sequence that is at least 70%, at least 75%, at least 80%, at least 85%, at least 90%, at least 95%, or at least 100% identical to a sequence selected from: SEQ ID NOS: 624, 628, 630, 634, 638, 641, 643, and 645. In some embodiments, the polypeptide is fused to at least one nuclear localization signal. In some cases, the polypeptide is capable of binding to the target nucleic acid but has reduced or no nuclease activity on the target nucleic acid. In some cases, the polypeptide is a nuclease that is capable of cleaving at least one strand of a target nucleic acid. In some cases, the system comprises a fusion partner protein fused to the polypeptide. In some cases, the length of the polypeptide is about 450 to about 550, about 400 to about 600, or about 450 to about 500 linked amino acids. In some cases, the composition comprises a recombinase. In some cases, the composition further comprises a target nucleic acid, and wherein the target nucleic acid comprises a PAM sequence selected from any one of SEQ ID NOs: 156-159, 325-328, and 369. In some cases, the composition comprises a donor nucleic acid.

[0770] Reagents and effector proteins of various systems may be provided in a reagent chamber or on the support medium. Alternatively, the reagent and/or effector protein may be contacted with the reagent chamber or the support medium by the individual using the system. An exemplary reagent chamber is a test well or container. The opening of the reagent chamber may be large enough to accommodate the support medium. Optionally, the system comprises a buffer and a dropper. The buffer may be provided in a dropper bottle for ease of dispensing. The dropper may be disposable and transfer a fixed volume. The dropper may be used to place a sample into the reagent chamber or on the support medium.

### System Solutions

[0771] In general, systems comprise a solution in which the activity of an effector protein occurs. Often, the solution comprises or consists essentially of a buffer. The solution or buffer may comprise a buffering agent, a salt, a crowding agent, a detergent, a reducing agent, a competitor, or a combination thereof. Often the buffer is the primary component or the basis for the solution in which the activity occurs. Thus, concentrations for components of buffers described herein (e.g., buffering agents, salts, crowding agents, detergents, reducing agents, and competitors) are the same or essentially the same as the concentration of these components in the solution in which the activity occurs. In some instances, a buffer is required for cell lysis activity or viral lysis activity.

[0772] In some instances, systems comprise a buffer, wherein the buffer comprise at least one buffering agent. Exemplary buffering agents include HEPES, TRIS, MES, ADA, PIPES, ACES, MOPSO, BIS-TRIS propane, BES, MOPS, TES, DISO, Trizma, TRICINE, GLY-GLY, HEPPS, BICINE, TAPS, A MPD, A MPSO, CHES, CAPSO, AMP, CAPS, phosphate, citrate, acetate, imidazole, or any combination thereof. In some instances, the concentration of the buffering agent in the buffer is 1 mM to 200 mM. A buffer compatible with an effector protein may comprise a buffering agent at a concentration of 10 mM to 30 mM. A buffer compatible with an effector protein may comprise a buffering agent at a concentration of about 20 mM. A buffering agent may provide a pH for the buffer or the solution in which the activity of the effector protein occurs. The pH may be 3 to 4, 3.5 to 4.5, 4 to 5, 4.5 to 5.5, 5 to 6, 5.5 to 6.5, 6 to 7, 6.5 to 7.5, 7 to 8, 7.5 to 8.5, 8 to 9, 8.5 to 9.5, 9 to 10, or 9.5 to 10.5.

[0773] In some instances, systems comprise a solution, wherein the solution comprises at least one salt. In some instances, the at least one salt is selected from potassium acetate, magnesium acetate, sodium chloride, potassium chloride, magnesium chloride, calcium chloride, and any combination thereof. In some instances, the concentration of the at least one salt in the solution is 5 mM to 100 mM, 5 mM to 10 mM, 1 mM to 60 mM, or 1 mM to 10 mM. In some instances, the concentration of the at least one salt is about 105 mM. In some instances, the concentration of the at least one salt is about 55 mM. In some instances, the concentration of the at least one salt is about 7 mM. In some instances, the solution comprises potassium acetate and magnesium acetate. In some instances, the solution comprises sodium chloride and magnesium chloride. In some instances, the solution comprises potassium chloride and magnesium chloride. In some instances, the salt is a magnesium salt and the concentration of magnesium in the solution is at least 5 mM, 7 mM, at least 9 mM, at least 11 mM, at least 13 mM, or at least 15 mM. In some instances, the concentration of magnesium is less than 20 mM, less than 18 mM or less than 16 mM.

[0774] In some instances, systems comprise a solution, wherein the solution comprises at least one crowding agent. A crowding agent may reduce the volume of solvent available for other molecules in the solution, thereby increasing the effective concentrations of said molecules. Exemplary crowding agents include glycerol and bovine serum albumin. In some instances, the crowding agent is glycerol. In some instances, the concentration of the crowding agent in the solution is 0.01% (v/v) to 10% (v/v). In some instances, the concentration of the crowding agent in the solution is 0.5% (v/v) to 10% (v/v).

[0775] In some instances, systems comprise a solution, wherein the solution comprises at least one detergent. Exemplary detergents include Tween, Triton-X, and IGEPAL. A solution may comprise Tween, Triton-X, or any combination thereof. A solution may comprise Triton-X. A solution may comprise IGEPAL CA-630. In some instances, the concentration of the detergent in the solution is 2% (v/v) or less. In some instances, the concentration of the detergent in the solution is 1% (v/v) or less. In some instances, the concentration of the detergent in the solution is 0.00001% (v/v) to 0.01% (v/v). In some instances, the concentration of the detergent in the solution is about 0.01% (v/v).

[0776] In some instances, systems comprise a solution, wherein the solution comprises at least one reducing agent. Exemplary reducing agents comprise dithiothreitol (DTT), ß-mercaptoethanol (BME), or tris(2-carboxyethyl) phosphine (TCEP). In some instances, the reducing agent is DTT. In some instances, the concentration of the reducing agent in the solution is 0.01 mM to 100 mM. In some instances, the concentration of the reducing agent in the solution is 0.1 mM to 10 mM. In some instances, the concentration of the reducing agent in the solution is 0.5 mM to 2 mM. In some instances, the concentration of the reducing agent in the solution is 0.01 mM to 100 mM. In some instances, the concentration of the reducing agent in the solution is 0.1 mM to 10 mM. In some instances, the concentration of the reducing agent in the solution is about 1 mM.

[0777] In some instances, systems comprise a solution, wherein the solution comprise a competitor. In general, competitors compete with the target nucleic acid or the reporter nucleic acid for cleavage by the effector protein or a dimer thereof. Exemplary competitors include heparin, and imidazole, and salmon sperm DNA. In some instances, the concentration of the competitor in the solution is 1 μg/mL to 100 μg/mL. In some instances, the concentration of the competitor in the solution is 40 μg/mL to 60 μg/mL.

[0778] In some instances, systems comprise a solution, wherein the solution comprise a co-factor. In some instances, the co-factor allows an effector protein or a multimeric complex thereof to perform a function, including pre-crRNA processing and/or target nucleic acid cleavage. The suitability of a cofactor for an effector protein or a multimeric complex thereof may be assessed, such as by methods based on those described by Sundaresan et al. (Cell Rep. 2017 Dec. 26; 21(13): 3728-3739). In some instances, an effector or a multimeric complex thereof forms a complex with a co-factor. In some instances, the co-factor is a divalent metal ion. In some instances, the divalent metal ion is selected from Mg²⁺, Mn²⁺, Zn²⁺, Ca²⁺, Cu²⁺. In some instances, the divalent metal ion is Mg²⁺. In some instances, the effector protein is a D2S effector protein and the co-factor is Mg²⁺.

### Reporters

[0779] In some embodiments, systems disclosed herein comprise a detection reagent and an amplification reagent. In some instances, a detection reagent comprises a reporter. In some embodiments, reporter and a reporter nucleic acid comprise a non-target nucleic acid molecule that can provide a detectable signal upon cleavage by an effector protein. In some instances, a detection reagent comprises an additional polypeptide. In some instances, a detection reagent comprises a detection moiety. In some instances, systems disclosed herein comprise a reporter. By way of non-limiting and illustrative example, a reporter may comprise a single stranded nucleic acid and a detection moiety (e.g., a labeled single stranded RNA reporter), wherein the nucleic acid is capable of being cleaved by an effector protein (e.g., a D2S CRISPR/Cas protein as disclosed herein) or a multimeric complex thereof, releasing the detection moiety, and, generating a detectable signal. As used herein, “reporter” is used interchangeably with “reporter nucleic acid” or “reporter molecule”. The effector proteins disclosed herein, activated upon hybridization of a guide RNA to a target nucleic acid, may cleave the reporter. Cleaving the “reporter” may be referred to herein as cleaving the “reporter nucleic acid,” the “reporter molecule,” or the “nucleic acid of the reporter.” Reporters may comprise RNA. Reporters may comprise DNA. Reporters may be double-stranded. Reporters may be single-stranded.

[0780] In some instances, reporters comprise a protein capable of generating a signal. A signal may be a calorimetric, potentiometric, amperometric, optical (e.g., fluorescent, colorimetric, etc.), or piezo-electric signal. In some instances, the reporter comprises a detection moiety. Suitable detectable labels and/or moieties that may provide a signal include, but are not limited to, an enzyme, a radioisotope, a member of a specific binding pair; a fluorophore; a fluorescent protein; a quantum dot; and the like.

[0781] In some instances, the reporter comprises a detection moiety and a quenching moiety. In some instances, the reporter comprises a cleavage site, wherein the detection moiety is located at a first site on the reporter and the quenching moiety is located at a second site on the reporter, wherein the first site and the second site are separated by the cleavage site. Sometimes the quenching moiety is a fluorescence quenching moiety. In some instances, the quenching moiety is 5′ to the cleavage site and the detection moiety is 3′ to the cleavage site. In some instances, the detection moiety is 5′ to the cleavage site and the quenching moiety is 3′ to the cleavage site. Sometimes the quenching moiety is at the 5′ terminus of the nucleic acid of a reporter. Sometimes the detection moiety is at the 3′ terminus of the nucleic acid of a reporter. In some instances, the detection moiety is at the 5′ terminus of the nucleic acid of a reporter. In some instances, the quenching moiety is at the 3′ terminus of the nucleic acid of a reporter.

[0782] Suitable fluorescent proteins include, but are not limited to, green fluorescent protein (GFP) or variants thereof, blue fluorescent variant of GFP (BFP), cyan fluorescent variant of GFP (CFP), yellow fluorescent variant of GFP (YFP), enhanced GFP (EGFP), enhanced CFP (ECFP), enhanced YFP (EYFP), GFPS65T, Emerald, Topaz (TYFP), Venus, Citrine, mCitrine, GFPuv, destabilised EGFP (dEGFP), destabilised ECFP (dECFP), destabilised EYFP (dEYFP), mCFPm, Cerulean, T-Sapphire, CyPet, YPet, mKO, HcRed, t-HcRed, DsRed, DsRed2, DsRed-monomer, J-Red, dimer2, t-dimer2(12), mRFP1, pocilloporin, Renilla GFP, Monster GFP, paGFP, Kaede protein and kindling protein, Phycobiliproteins and Phycobiliprotein conjugates including B-Phycoerythrin, R-Phycoerythrin and Allophycocyanin. Suitable enzymes include, but are not limited to, horse radish peroxidase (HRP), alkaline phosphatase (AP), beta-galactosidase (GAL), glucose-6-phosphate dehydrogenase, beta-N-acetylglucosaminidase, β-glucuronidase, invertase, Xanthine Oxidase, firefly luciferase, and glucose oxidase (GO).

[0783] In some instances, the detection moiety comprises an polypeptide. In some instances, the detection moiety comprises an invertase. The substrate of the invertase may be sucrose. A DNS reagent may be included in the system to produce a colorimetric change when the invertase converts sucrose to glucose. In some instances, the reporter nucleic acid and invertase are conjugated using a heterobifunctional linker via sulfo-SMCC chemistry.

[0784] Suitable fluorophores may provide a detectable fluorescence signal in the same range as 6-Fluorescein (Integrated DNA Technologies), IRDye 700 (Integrated DNA Technologies), TYE 665 (Integrated DNA Technologies), Alex Fluor 594 (Integrated DNA Technologies), or ATTO TM 633 (NHS Ester) (Integrated DNA Technologies). Non-limiting examples of fluorophores are fluorescein amidite, 6-Fluorescein, IRDye 700, TYE 665, Alex Fluor 594, or ATTO TM 633 (NHS Ester). The fluorophore may be an infrared fluorophore. The fluorophore may emit fluorescence in the range of 500 nm and 720 nm. In some instances, the fluorophore emits fluorescence at a wavelength of 700 nm or higher. In other cases, the fluorophore emits fluorescence at about 665 nm. In some instances, the fluorophore emits fluorescence in the range of 500 nm to 520 nm, 500 nm to 540 nm, 500 nm to 590 nm, 590 nm to 600 nm, 600 nm to 610 nm, 610 nm to 620 nm, 620 nm to 630 nm, 630 nm to 640 nm, 640 nm to 650 nm, 650 nm to 660 nm, 660 nm to 670 nm, 670 nm to 680 nm, 690 nm to 690 nm, 690 nm to 700 nm, 700 nm to 710 nm, 710 nm to 720 nm, or 720 nm to 730 nm. In some instances, the fluorophore emits fluorescence in the range 450 nm to 750 nm, 500 nm to 650 nm, or 550 to 650 nm.

[0785] Systems may comprise a quenching moiety. A quenching moiety may be chosen based on its ability to quench the detection moiety. A quenching moiety may be a non-fluorescent fluorescence quencher. A quenching moiety may quench a detection moiety that emits fluorescence in the range of 500 nm and 720 nm. A quenching moiety may quench a detection moiety that emits fluorescence in the range of 500 nm and 720 nm. In some instances, the quenching moiety quenches a detection moiety that emits fluorescence at a wavelength of 700 nm or higher. In other cases, the quenching moiety quenches a detection moiety that emits fluorescence at about 660 nm or about 670 nm. In some instances, the quenching moiety quenches a detection moiety that emits fluorescence in the range of 500 to 520, 500 to 540, 500 to 590, 590 to 600, 600 to 610, 610 to 620, 620 to 630, 630 to 640, 640 to 650, 650 to 660, 660 to 670, 670 to 680, 690 to 690, 690 to 700, 700 to 710, 710 to 720, or 720 to 730 nm. In some instances, the quenching moiety quenches a detection moiety that emits fluorescence in the range 450 nm to 750 nm, 500 nm to 650 nm, or 550 to 650 nm. A quenching moiety may quench fluorescein amidite, 6-Fluorescein, IRDye 700, TYE 665, Alex Fluor 594, or ATTO TM 633 (NHS Ester). A quenching moiety may be Iowa Black RQ, Iowa Black FQ or IRDye QC-1 Quencher. A quenching moiety may quench fluorescein amidite, 6-Fluorescein (Integrated DNA Technologies), IRDye 700 (Integrated DNA Technologies), TYE 665 (Integrated DNA Technologies), Alex Fluor 594 (Integrated DNA Technologies), or ATTO TM 633 (NHS Ester) (Integrated DNA Technologies). A quenching moiety may be Iowa Black RQ (Integrated DNA Technologies), Iowa Black FQ (Integrated DNA Technologies) or IRDye QC-1 Quencher (LiCor). Any of the quenching moieties described herein may be from any commercially available source, may be an alternative with a similar function, a generic, or a non-tradename of the quenching moieties listed.

[0786] The generation of the detectable signal from the release of the detection moiety indicates that cleavage by the effector protein has occurred and that the sample contains the target nucleic acid. In some instances, the detection moiety comprises a fluorescent dye. Sometimes the detection moiety comprises a fluorescence resonance energy transfer (FRET) pair. In some instances, the detection moiety comprises an infrared (IR) dye. In some instances, the detection moiety comprises an ultraviolet (UV) dye. Alternatively, or in combination, the detection moiety comprises a protein. Sometimes the detection moiety comprises a biotin. Sometimes the detection moiety comprises at least one of avidin or streptavidin. In some instances, the detection moiety comprises a polysaccharide, a polymer, or a nanoparticle. In some instances, the detection moiety comprises a gold nanoparticle or a latex nanoparticle.

[0787] A detection moiety may be any moiety capable of generating a calorimetric, potentiometric, amperometric, optical (e.g., fluorescent, colorimetric, etc.), or piezo-electric signal. A nucleic acid of a reporter, sometimes, is protein-nucleic acid that is capable of generating a calorimetric, potentiometric, amperometric, optical (e.g., fluorescent, colorimetric, etc.), or piezo-electric signal upon cleavage of the nucleic acid. Often a calorimetric signal is heat produced after cleavage of the nucleic acids of a reporter. Sometimes, a calorimetric signal is heat absorbed after cleavage of the nucleic acids of a reporter. A potentiometric signal, for example, is electrical potential produced after cleavage of the nucleic acids of a reporter. An amperometric signal may be movement of electrons produced after the cleavage of nucleic acid of a reporter. Often, the signal is an optical signal, such as a colorimetric signal or a fluorescence signal. An optical signal is, for example, a light output produced after the cleavage of the nucleic acids of a reporter. Sometimes, an optical signal is a change in light absorbance between before and after the cleavage of nucleic acids of a reporter. Often, a piezo-electric signal is a change in mass between before and after the cleavage of the nucleic acid of a reporter.

[0788] The detectable signal may be a colorimetric signal or a signal visible by eye. In some instances, the detectable signal may be fluorescent, electrical, chemical, electrochemical, or magnetic. In some instances, the first detection signal may be generated by binding of the detection moiety to the capture molecule in the detection region, where the first detection signal indicates that the sample contained the target nucleic acid. Sometimes systems are capable of detecting more than one type of target nucleic acid, wherein the system comprises more than one type of guide nucleic acid and more than one type of reporter nucleic acid. In some instances, the detectable signal may be generated directly by the cleavage event. Alternatively, or in combination, the detectable signal may be generated indirectly by the signal event. Sometimes the detectable signal is not a fluorescent signal. In some instances, the detectable signal may be a colorimetric or color-based signal. In some instances, the detected target nucleic acid may be identified based on its spatial location on the detection region of the support medium. In some instances, the second detectable signal may be generated in a spatially distinct location than the first generated signal.

[0789] In some instances, the reporter nucleic acid is a single-stranded nucleic acid sequence comprising ribonucleotides. The nucleic acid of a reporter may be a single-stranded nucleic acid sequence comprising at least one ribonucleotide. In some instances, the nucleic acid of a reporter is a single-stranded nucleic acid comprising at least one ribonucleotide residue at an internal position that functions as a cleavage site. In some instances, the nucleic acid of a reporter comprises at least 2, at least 3, at least 4, at least 5, at least 6, at least 7, at least 8, at least 9, or at least 10 ribonucleotide residues at an internal position. In some instances, the nucleic acid of a reporter comprises from 2 to 10, from 3 to 9, from 4 to 8, or from 5 to 7 ribonucleotide residues at an internal position. Sometimes the ribonucleotide residues are continuous. Alternatively, the ribonucleotide residues are interspersed in between non-ribonucleotide residues. In some instances, the nucleic acid of a reporter has only ribonucleotide residues. In some instances, the nucleic acid of a reporter has only deoxyribonucleotide residues. In some instances, the nucleic acid comprises nucleotides resistant to cleavage by the effector protein described herein. In some instances, the nucleic acid of a reporter comprises synthetic nucleotides. In some instances, the nucleic acid of a reporter comprises at least one ribonucleotide residue and at least one non-ribonucleotide residue.

[0790] In some instances, the nucleic acid of a reporter comprises at least one uracil ribonucleotide. In some instances, the nucleic acid of a reporter comprises at least two uracil ribonucleotides. Sometimes the nucleic acid of a reporter has only uracil ribonucleotides. In some instances, the nucleic acid of a reporter comprises at least one adenine ribonucleotide. In some instances, the nucleic acid of a reporter comprises at least two adenine ribonucleotide. In some instances, the nucleic acid of a reporter has only adenine ribonucleotides. In some instances, the nucleic acid of a reporter comprises at least one cytosine ribonucleotide. In some instances, the nucleic acid of a reporter comprises at least two cytosine ribonucleotide. In some instances, the nucleic acid of a reporter comprises at least one guanine ribonucleotide. In some instances, the nucleic acid of a reporter comprises at least two guanine ribonucleotide. In some instances, a nucleic acid of a reporter comprises a single unmodified ribonucleotide. In some instances, a nucleic acid of a reporter comprises only unmodified deoxyribonucleotides.

[0791] In some instances, the nucleic acid of a reporter is 5 to 20, 5 to 15, 5 to 10, 7 to 20, 7 to 15, or 7 to 10 nucleotides in length. In some instances, the nucleic acid of a reporter is 3 to 20, 4 to 10, 5 to 10, or 5 to 8 nucleotides in length. In some instances, the nucleic acid of a reporter is 5 to 12 nucleotides in length. In some instances, the reporter nucleic acid is at least 2, at least 3, at least 4, at least 5, at least 6, at least 7, at least 8, at least 9, at least 10, at least 11, at least 12, at least 13, at least 14, at least 15, at least 16, at least 17, at least 18, at least 19, at least 20, at least 21, at least 22, at least 23, at least 24, at least 25, at least 26, at least 27, at least 28, at least 29, or at least 30 nucleotides in length. In some instances, the reporter nucleic acid is 2, 3, 4, 5, 6, 7, 8, 9, 10, 11, 12, 13, 14, 15, 16, 17, 18, 19, 20, 21, 22, 23, 24, 25, 26, 27, 28, 29, or 30 nucleotides in length.

[0792] In some instances, systems comprise a plurality of reporters. The plurality of reporters may comprise a plurality of signals. In some instances, systems comprise at least 2, at least 3, at least 4, at least 5, at least 6, at least 7, at least 8, at least 9, at least 10, at least 11, at least 12, at least 13, at least 14, at least 15, at least 20, at least 30, at least 40, or at least 50 reporters. In some instances, there are 2 to 50, 3 to 40, 4 to 30, 5 to 20, or 6 to 10 different reporters.

[0793] In some instances, systems comprise a D2S effector protein and a reporter nucleic acid configured to undergo transcollateral cleavage by the D2S effector protein. Transcollateral cleavage of the reporter may generate a signal from reporter or alter a signal from the reporter. In some instances, the signal is an optical signal, such as a fluorescence signal or absorbance band. Transcollateral cleavage of the reporter may alter the wavelength, intensity, or polarization of the optical signal. For example, the reporter may comprise a fluorophore and a quencher, such that transcollateral cleavage of the reporter separates the fluorophore and the quencher thereby increasing a fluorescence signal from the fluorophore. Herein, detection of reporter cleavage to determine the presence of a target nucleic acid sequence may be referred to as ‘DETECTR’. In some instances described herein is a method of assaying for a target nucleic acid in a sample comprising contacting the target nucleic acid with an effector protein, a non-naturally occurring guide nucleic acid that hybridizes to a segment of the target nucleic acid, and a reporter nucleic acid, and assaying for a change in a signal, wherein the change in the signal is produced by cleavage of the reporter nucleic acid.

[0794] In the presence of a large amount of non-target nucleic acids, an activity of an effector protein (e.g., a D2S effector protein as disclosed herein) may be inhibited. This is because the activated effector proteins collaterally cleave any nucleic acids. If total nucleic acids are present in large amounts, they may outcompete reporters for the effector proteins. In some instances, systems comprise an excess of reporter(s), such that when the system is operated and a solution of the system comprising the reporter is combined with a sample comprising a target nucleic acid, the concentration of the reporter in the combined solution-sample is greater than the concentration of the target nucleic acid. In some instances, the sample comprises amplified target nucleic acid. In some instances, the sample comprises an unamplified target nucleic acid. In some instances, the concentration of the reporter is greater than the concentration of target nucleic acids and non-target nucleic acids. The non-target nucleic acids may be from the original sample, either lysed or unlysed. The non-target nucleic acids may comprise byproducts of amplification. In some instances, systems comprise a reporter wherein the concentration of the reporter in a solution 1.5 fold, at least 2 fold, at least 3 fold, at least 4 fold, at least 5 fold, at least 6 fold, at least 7 fold, at least 8 fold, at least 9 fold, at least 10 fold, at least 11 fold, at least 12 fold, at least 13 fold, at least 14 fold, at least 15 fold, at least 16 fold, at least 17 fold, at least 18 fold, at least 19 fold, at least 20 fold, at least 30 fold, at least 40 fold, at least 50 fold, at least 60 fold, at least 70 fold, at least 80 fold, at least 90 fold, at least 100 fold excess of total nucleic acids. 1.5 fold to 100 fold, 2 fold to 10 fold, 10 fold to 20 fold, 20 fold to 30 fold, 30 fold to 40 fold, 40 fold to 50 fold, 50 fold to 60 fold, 60 fold to 70 fold, 70 fold to 80 fold, 80 fold to 90 fold, 90 fold to 100 fold, 1.5 fold to 10 fold, 1.5 fold to 20 fold, 10 fold to 40 fold, 20 fold to 60 fold, or 10 fold to 80 fold excess of total nucleic acids.

### Amplification Reagents/Components

[0795] In some instances, systems described herein comprise a reagent or component for amplifying a nucleic acid. In some embodiments, amplification and amplifying or grammatical equivalents thereof, comprise a process by which a nucleic acid molecule is enzymatically copied to generate a plurality of nucleic acid molecules containing the same sequence as the original nucleic acid molecule or a distinguishable portion thereof. Non-limiting examples of reagents for amplifying a nucleic acid include polymerases, primers, and nucleotides (e.g., dNTPs or rNTPs). In some instances, systems comprise reagents for nucleic acid amplification of a target nucleic acid in a sample. Nucleic acid amplification of the target nucleic acid may improve at least one of sensitivity, specificity, or accuracy of the assay in detecting the target nucleic acid. In some instances, nucleic acid amplification is isothermal nucleic acid amplification, providing for the use of the system or system in remote regions or low resource settings without specialized equipment for amplification. In some instances, amplification of the target nucleic acid increases the concentration of the target nucleic acid in the sample relative to the concentration of nucleic acids that do not correspond to the target nucleic acid.

[0796] The reagents for nucleic acid amplification may comprise a recombinase, an oligonucleotide primer, a single-stranded DNA binding (SSB) protein, a polymerase, or a combination thereof that is suitable for an amplification reaction. Non-limiting examples of amplification reactions are transcription mediated amplification (TMA), helicase dependent amplification (HDA), or circular helicase dependent amplification (cHDA), strand displacement amplification (SDA), recombinase polymerase amplification (RPA), loop mediated amplification (LAMP), exponential amplification reaction (EXPAR), rolling circle amplification (RCA), ligase chain reaction (LCR), simple method amplifying RNA targets (SMART), single primer isothermal amplification (SPIA), multiple displacement amplification (MDA), nucleic acid sequence based amplification (NASBA), hinge-initiated primer-dependent amplification of nucleic acids (HIP), nicking enzyme amplification reaction (NEAR), and improved multiple displacement amplification (IMDA).

[0797] In some instances, systems comprise a PCR tube, a PCR well or a PCR plate. The wells of the PCR plate may be pre-aliquoted with the reagent for amplifying a nucleic acid, as well as a guide nucleic acid, an effector protein, a multimeric complex, or any combination thereof. The wells of the PCR plate may be pre-aliquoted with a guide nucleic acid targeting a target sequence, an effector protein capable of being activated when complexed with the guide nucleic acid and the target sequence, and at least one population of a single stranded reporter nucleic acid comprising a detection moiety. A user may thus add the biological sample of interest to a well of the pre-aliquoted PCR plate and measure for the detectable signal with a fluorescent light reader or a visible light reader.

[0798] In some instances, systems comprise a PCR plate; a guide nucleic acid targeting a target sequence; an effector protein capable of being activated when complexed with the guide nucleic acid and the target sequence; and a single stranded reporter nucleic acid comprising a detection moiety, wherein the reporter nucleic acid is capable of being cleaved by the activated nuclease, thereby generating a detectable signal.

[0799] In some instances, systems comprise a support medium; a guide nucleic acid targeting a target sequence; and an effector protein capable of being activated when complexed with the guide nucleic acid and the target sequence. In some instances, nucleic acid amplification is performed in a nucleic acid amplification region on the support medium. Alternatively, or in combination, the nucleic acid amplification is performed in a reagent chamber, and the resulting sample is applied to the support medium.

[0800] In some instances, a system for modifying a target nucleic acid comprises a PCR plate; a guide nucleic acid targeting a target sequence; and an effector protein capable of being activated when complexed with the guide nucleic acid and the target sequence. The wells of the PCR plate may be pre-aliquoted with the guide nucleic acid targeting a target sequence, and an effector protein capable of being activated when complexed with the guide nucleic acid and the target sequence. A user may thus add the biological sample of interest to a well of the pre-aliquoted PCR plate.

[0801] Often, the nucleic acid amplification is performed for no greater than 1, 2, 3, 4, 5, 6, 7, 8, 9, 10, 11, 12, 13, 14, 15, 16, 17, 18, 19, 20, 25, 30, 40, 50, or 60 minutes, or any value 1 to 60 minutes. Sometimes, the nucleic acid amplification is performed for 1 to 60, 5 to 55, 10 to 50, 15 to 45, 20 to 40, or 25 to 35 minutes. Sometimes, the nucleic acid amplification reaction is performed at a temperature of around 20-45° C. In some instances, the nucleic acid amplification reaction is performed at a temperature no greater than 20° C., 25° C., 30° C., 35° C., 37° C., 40° C., 45° C., or any value 20° C. to 45° C. In some instances, the nucleic acid amplification reaction is performed at a temperature of at least 20° C., 25° C., 30° C., 35° C., 37° C., 40° C., or 45° C., or any value 20° C. to 45° C. In some instances, the nucleic acid amplification reaction is performed at a temperature of 20° C. to 45° C., 25° C. to 40° C., 30° C. to 40° C., or 35° C. to 40° C.

[0802] Often, systems comprise primers for amplifying a target nucleic acid to produce an amplification product comprising the target nucleic acid and a PAM. For instance, at least one of the primers may comprise the PAM that is incorporated into the amplification product during amplification. The compositions for amplification of target nucleic acids and methods of use thereof, as described herein, are compatible with any of the methods disclosed herein including methods of assaying for at least one base difference (e.g., assaying for a SNP or a base mutation) in a target nucleic acid sequence, methods of assaying for a target nucleic acid that lacks a PAM by amplifying the target nucleic acid sequence to introduce a PAM, and compositions used in introducing a PAM via amplification into the target nucleic acid sequence.

### Additional System Components

[0803] In some instances, systems include a package, carrier, or container that is compartmentalized to receive one or more containers such as vials, tubes, and the like, each of the container(s) comprising one of the separate elements to be used in a method described herein. Suitable containers include, for example, test wells, bottles, vials, and test tubes. In one embodiment, the containers are formed from a variety of materials such as glass, plastic, or polymers. The system or systems described herein contain packaging materials. Examples of packaging materials include, but are not limited to, pouches, blister packs, bottles, tubes, bags, containers, bottles, and any packaging material suitable for intended mode of use.

[0804] A system may include labels listing contents and/or instructions for use, or package inserts with instructions for use. A set of instructions will also typically be included. In one embodiment, a label is on or associated with the container. In some instances, a label is on a container when letters, numbers or other characters forming the label are attached, molded or etched into the container itself; a label is associated with a container when it is present within a receptacle or carrier that also holds the container, e.g., as a package insert. In one embodiment, a label is used to indicate that the contents are to be used for a specific therapeutic application. The label also indicates directions for use of the contents, such as in the methods described herein. After packaging the formed product and wrapping or boxing to maintain a sterile barrier, the product may be terminally sterilized by heat sterilization, gas sterilization, gamma irradiation, or by electron beam sterilization. Alternatively, the product may be prepared and packaged by aseptic processing.

[0805] In some instances, systems comprise a solid support. An RNP or effector protein may be attached to a solid support. The solid support may be an electrode or a bead. The bead may be a magnetic bead. Upon cleavage, the RNP is liberated from the solid support and interacts with other mixtures. For example, upon cleavage of the nucleic acid of the RNP, the effector protein of the RNP flows through a chamber into a mixture comprising a substrate. When the effector protein meets the substrate, a reaction occurs, such as a colorimetric reaction, which is then detected. As another example, the protein is an enzyme substrate, and upon cleavage of the nucleic acid of the enzyme substrate-nucleic acid, the enzyme flows through a chamber into a mixture comprising the enzyme. When the enzyme substrate meets the enzyme, a reaction occurs, such as a calorimetric reaction, which is then detected.

### Certain System Conditions

[0806] In some instances, systems and methods are employed under certain conditions that enhance an activity of the effector protein relative to alternative conditions, as measured by a detectable signal released from cleavage of a reporter in the presence of the target nucleic acid. The detectable signal may be generated at about the rate of transcollateral cleavage of a reporter nucleic acid. In some instances, the reporter nucleic acid is a homopolymeric reporter nucleic acid comprising 5 to 20 consecutive adenines, 5 to 20 consecutive thymines, 5 to 20 consecutive cytosines, or 5 to 20 consecutive guanines. In some instances, the reporter is an RNA-FQ reporter.

[0807] In some instances, effector proteins disclosed herein recognize, bind, or are activated by, different target nucleic acids having different sequences, but are active toward the same reporter nucleic acid, allowing for facile multiplexing in a single assay having a single ssRNA-FQ reporter.

[0808] In some instances, systems are employed under certain conditions that enhance transcollateral cleavage activity of an effector protein. In some instances, under certain conditions, transcolatteral cleavage occurs at a rate of at least 0.005 mmol/min, at least 0.01 mmol/min, at least 0.05 mmol/min, at least 0.1 mmol/min, at least 0.2 mmol/min, at least 0.5 mmol/min, or at least 1 mmol/min. In some instances, systems and methods are employed under certain conditions that enhance cis-cleavage activity of the effector protein.

[0809] Certain conditions that may enhance the activity of an effector protein include a certain salt presence or salt concentration of the solution in which the activity occurs. For example, cis-cleavage activity of an effector protein may be inhibited or halted by a high salt concentration. The salt may be a sodium salt, a potassium salt, or a magnesium salt. In some instances, the salt is NaCl. In some instances, the salt is KNO₃. In some instances, the salt concentration is less than 150 mM, less than 125 mM, less than 100 mM, less than 75 mM, less than 50 mM, or less than 25 mM.

[0810] Certain conditions that may enhance the activity of an effector protein includes the pH of a solution in which the activity. For example, increasing pH may enhance transcollateral activity. For example, the rate of transcollateral activity may increase with increase in pH up to pH 9. In some instances, the pH is about 7, about 7.1, about 7.2, about 7.3, about 7.4, about 7.5, about 7.6, about 7.7, about 7.8, about 7.9, about 8, about 8.1, about 8.2, about 8.3, about 8.4, about 8.5, about 8.6, about 8.7, about 8.8, about 8.9, or about 9. In some instances, the pH is 7 to 7.5, 7.5 to 8, 8 to 8.5, 8.5 to 9, or 7 to 8.5. In some instances, the pH is less than 7. In some instances, the pH is greater than 7.

[0811] Certain conditions that may enhance the activity of an effector protein includes the temperature at which the activity is performed. In some instances, the temperature is about 25° C. to about 50° C. In some instances, the temperature is about 20° C. to about 40° C., about 30° C. to about 50° C., or about 40° C. to about 60° C. In some instances, the temperature is about 25° C., about 30° C., about 35° C., about 40° C., about 45° C., or about 50° C.

[0812] In some instances, a final concentration an effector protein in a buffer of a system is 1 pM to 1 nM, 1 pM to 10 pM, 10 pM to 100 pM, 100 pM to 1 nM, 1 nM to 10 nM, 10 nM to 20 nM, 20 nM to 30 nM, 30 nM to 40 nM, 40 nM to 50 nM, 50 nM to 60 nM, 60 nM to 70 nM, 70 nM to 80 nM, 80 nM to 90 nM, 90 nM to 100 nM, 100 nM to 200 nM, 200 nM to 300 nM, 300 nM to 400 nM, 400 nM to 500 nM, 500 nM to 600 nM, 600 nM to 700 nM, 700 nM to 800 nM, 800 nM to 900 nM, 900 nM to 1000 nM. The final concentration of the sgRNA complementary to the target nucleic acid may be 1 pM to 1 nM, 1 pM to 10 pM, 10 pM to 100 pM, 100 pM to 1 nM, 1 nM to 10 nM, 10 nM to 20 nM, 20 nM to 30 nM, 30 nM to 40 nM, 40 nM to 50 nM, 50 nM to 60 nM, 60 nM to 70 nM, 70 nM to 80 nM, 80 nM to 90 nM, 90 nM to 100 nM, 100 nM to 200 nM, 200 nM to 300 nM, 300 nM to 400 nM, 400 nM to 500 nM, 500 nM to 600 nM, 600 nM to 700 nM, 700 nM to 800 nM, 800 nM to 900 nM, 900 nM to 1000 nM. The concentration of the ssDNA-FQ reporter may be 1 pM to 1 nM, 1 pM to 10 pM, 10 pM to 100 pM, 100 pM to 1 nM, 1 nM to 10 nM, 10 nM to 20 nM, 20 nM to 30 nM, 30 nM to 40 nM, 40 nM to 50 nM, 50 nM to 60 nM, 60 nM to 70 nM, 70 nM to 80 nM, 80 nM to 90 nM, 90 nM to 100 nM, 100 nM to 200 nM, 200 nM to 300 nM, 300 nM to 400 nM, 400 nM to 500 nM, 500 nM to 600 nM, 600 nM to 700 nM, 700 nM to 800 nM, 800 nM to 900 nM, 900 nM to 1000 nM.

[0813] In some instances, systems comprise an excess volume of solution comprising the guide nucleic acid, the effector protein and the reporter, which contacts a smaller volume comprising a sample with a target nucleic acid. The smaller volume comprising the sample may be unlysed sample, lysed sample, or lysed sample which has undergone any combination of reverse transcription, amplification, and in vitro transcription. The presence of various reagents, (such as buffer, magnesium sulfate, salts, the pH, a reducing agent, primers, dNTPs, NTPs, cellular lysates, non-target nucleic acids, primers, or other components), in a crude, non-lysed sample, a lysed sample, or a lysed and amplified sample, may inhibit the ability of the effector protein to become activated or to find and cleave the nucleic acid of the reporter. This may be due to nucleic acids that are not the reporter outcompeting the nucleic acid of the reporter, for the effector protein. Alternatively, various reagents in the sample may simply inhibit the activity of the effector protein. Thus, the compositions and methods provided herein for contacting an excess volume comprising the engineered guide nucleic acid, the effector protein, and the reporter to a smaller volume comprising the sample with the target nucleic acid of interest provides for superior detection of the target nucleic acid by ensuring that the effector protein is able to find and cleaves the nucleic acid of the reporter. In some instances, the volume comprising the guide nucleic acid, the effector protein, and the reporter (may be referred to as “a second volume”) is 4-fold greater than a volume comprising the sample (may be referred to as “a first volume”). In some instances, the volume comprising the guide nucleic acid, the effector protein, and the reporter (may be referred to as “a second volume”) is at least 1.5 fold, at least 2 fold, at least 3 fold, at least 4 fold, at least 5 fold, at least 6 fold, at least 7 fold, at least 8 fold, at least 9 fold, at least 10 fold, at least 11 fold, at least 12 fold, at least 13 fold, at least 14 fold, at least 15 fold, at least 16 fold, at least 17 fold, at least 18 fold, at least 19 fold, at least 20 fold, at least 30 fold, at least 40 fold, at least 50 fold, at least 60 fold, at least 70 fold, at least 80 fold, at least 90 fold, at least 100 fold, 1.5 fold to 100 fold, 2 fold to 10 fold, 10 fold to 20 fold, 20 fold to 30 fold, 30 fold to 40 fold, 40 fold to 50 fold, 50 fold to 60 fold, 60 fold to 70 fold, 70 fold to 80 fold, 80 fold to 90 fold, 90 fold to 100 fold, 1.5 fold to 10 fold, 1.5 fold to 20 fold, 10 fold to 40 fold, 20 fold to 60 fold, or 10 fold to 80 fold greater than a volume comprising the sample (may be referred to as “a first volume”). In some instances, the volume comprising the sample is at least 0.5 μL, at least 1 μL, at least at least 1 μL, at least 2 μL, at least 3 μL, at least 4 μL, at least 5 μL, at least 6 μL, at least 7 μL, at least 8 μL, at least 9 μL, at least 10 μL, at least 11 μL, at least 12 μL, at least 13 μL, at least 14 μL, at least 15 μL, at least 16 μL, at least 17 μL, at least 18 μL, at least 19 μL, at least 20 μL, at least 25 μL, at least 30 μL, at least 35 μL, at least 40 μL, at least 45 μL, at least 50 μL, at least 55 μL, at least 60 μL, at least 65 μL, at least 70 μL, at least 75 μL, at least 80 μL, at least 85 μL, at least 90 μL, at least 95 μL, at least 100 μL, 0.5 μL to 5 μL μL, 5 μL to 10 μL, 10 μL to 15 μL, 15 μL to 20 μL, 20 μL to 25 μL, 25 μL to 30 μL, 30 μL to 35 μL, 35 μL to 40 μL, 40 μL to 45 μL, 45 μL to 50 μL, 10 μL to 20 μL, 5 μL to 20 μL, 1 μL to 40 μL, 2 μL to 10 μL, or 1 μL to 10 μL. In some instances, the volume comprising the effector protein, the guide nucleic acid, and the reporter is at least 10 μL, at least 11 μL, at least 12 μL, at least 13 μL, at least 14 μL, at least 15 μL, at least 16 μL, at least 17 μL, at least 18 μL, at least 19 μL, at least 20 μL, at least 21 μL, at least 22 μL, at least 23 μL, at least 24 μL, at least 25 μL, at least 26 μL, at least 27 μL, at least 28 μL, at least 29 μL, at least 30 μL, at least 40 μL, at least 50 μL, at least 60 μL, at least 70 μL, at least 80 μL, at least 90 μL, at least 100 μL, at least 150 μL, at least 200 μL, at least 250 μL, at least 300 μL, at least 350 μL, at least 400 μL, at least 450 μL, at least 500 μL, 10 μL to 15 μL μL, 15 μL to 20 μL, 20 μL to 25 μL, 25 μL to 30 μL, 30 μL to 35 μL, 35 μL to 40 μL, 40 μL to 45 μL, 45 μL to 50 μL, 50 μL to 55 μL, 55 μL to 60 μL, 60 μL to 65 μL, 65 μL to 70 μL, 70 μL to 75 μL, 75 μL to 80 μL, 80 μL to 85 μL, 85 μL to 90 μL, 90 μL to 95 μL, 95 μL to 100 μL, 100 μL to 150 μL, 150 μL to 200 μL, 200 μL to 250 μL, 250 μL to 300 μL, 300 μL to 350 μL, 350 μL to 400 μL, 400 μL to 450 μL, 450 μL to 500 μL, 10 μL to 20 μL, 10 μL to 30 μL, 25 μL to 35 μL, 10 μL to 40 μL, 20 μL to 50 μL, 18 μL to 28 μL, or 17 μL to 22 μL.

[0814] In some instances, systems comprise an effector protein that nicks a target nucleic acid, thereby producing a nicked product. In some instances, systems cleave a target nucleic acid, thereby producing a linearized product. In some instances, systems produce at least 50%, at least 55%, at least 60%, at least 65%, at least 70%, at least 75%, at least 80%, at least 85%, at least 90 or at least 95% of a maximum amount of nicked product within 1 minute, where the maximum amount of nicked product is the maximum amount detected within a 60 minute period from when the target nucleic acid is mixed with the effector protein or the multimeric complex thereof. In some instances, systems produce at least 50%, at least 55%, at least 60%, at least 65%, at least 70%, at least 75%, at least 80%, at least 85%, at least 90 or at least 95% of a maximum amount of linearized product within 1 minute, where the maximum amount of linearized product is the maximum amount detected within a 60 minute period from when the target nucleic acid is mixed with the effector protein. In some instances, at least 80% of the maximum amount of linearized product is produced within 1 minute. In some instances, at least 90% of the maximum amount of linearized product is produced within 1 minute.

### X. Methods and Formulations for Introducing Systems and Compositions into a Target Cell

[0815] A guide RNA (or a nucleic acid comprising a nucleotide sequence encoding same) and/or an effector protein described herein can be introduced into a host cell by any of a variety of well-known methods. As a non-limiting example, a guide RNA and/or effector protein can be combined with a lipid. As another non-limiting example, a guide RNA and/or effector protein can be combined with a particle, or formulated into a particle.

### Methods for Introducing Systems and Compositions to a Host

[0816] Described herein are methods of introducing various components described herein to a host. A host can be any suitable host, such as a host cell. When described herein, a host cell can be an in vivo or in vitro eukaryotic cell, a prokaryotic cell (e.g., bacterial or archaeal cell), or a cell from a multicellular organism (e.g., a cell line) cultured as a unicellular entity, which eukaryotic or prokaryotic cells can be, or have been, used as recipients for methods of introduction described herein, and include the progeny of the original cell which has been transformed by the methods of introduction described herein. It is understood that the progeny of a single cell may not necessarily be completely identical in morphology or in genomic or total DNA complement as the original parent, due to natural, accidental, or deliberate mutation. A host cell can be a recombinant host cell or a genetically modified host cell, if a heterologous nucleic acid, e.g., an expression vector, has been introduced into the cell.

[0817] Methods of introducing a nucleic acid and/or protein into a host cell are known in the art, and any convenient method can be used to introduce a subject nucleic acid (e.g., an expression construct/vector) into a target cell (e.g., a human cell, and the like). Suitable methods include, e.g., viral infection, transfection, conjugation, protoplast fusion, lipofection, electroporation, calcium phosphate precipitation, polyethyleneimine (PEI)-mediated transfection, DEAE-dextran mediated transfection, liposome-mediated transfection, particle gun technology, calcium phosphate precipitation, direct micro injection, nanoparticle-mediated nucleic acid delivery (see, e.g., Panyam et al. Adv Drug Deliv Rev. 2012 Sep. 13. pii: 50169-409X(12)00283-9. doi: 10.1016/j.addr.2012.09.023), and the like. In some instances, the nuclei acid and/or protein are introduced into a disease cell comprised in a pharmaceutical composition comprising the guide RNA and/or D2S effector protein and a pharmaceutically acceptable excipient.

[0818] In certain embodiments, molecules of interest, such as nucleic acids of interest, are introduced to a host. In certain embodiments, polypeptides, such as a effector protein are introduced to a host. In certain embodiments, vectors, such as lipid particles and/or viral vectors can be introduced to a host. Introduction can be for contact with a host or for assimilation into the host, for example, introduction into a host cell.

[0819] In some instances, described herein are methods of introducing one or more nucleic acids, such as a nucleic acid encoding a effector protein, a nucleic acid encoding an engineered guide nucleic acid, and/or a donor nucleic acid, or combinations thereof, into a host cell. Any suitable method can be used to introduce a nucleic acid into a cell. Suitable methods include, for example, viral infection, transfection, lipofection, electroporation, calcium phosphate precipitation, polyethyleneimine (PEI)-mediated transfection, DEAE-dextran mediated transfection, liposome-mediated transfection, particle gun technology, calcium phosphate precipitation, direct microinjection, nanoparticle-mediated nucleic acid delivery, and the like. Further methods are described throughout.

[0820] Introducing one or more nucleic acids into a host cell can occur in any culture media and under any culture conditions that promote the survival of the cells. Introducing one or more nucleic acids into a host cell can be carried out in vivo or ex vivo. Introducing one or more nucleic acids into a host cell can be carried out in vitro.

[0821] In some embodiments, a effector protein can be provided as RNA. The RNA can be provided by direct chemical synthesis or may be transcribed in vitro from a DNA (e.g., encoding the effector protein). Once synthesized, the RNA may be introduced into a cell by way of any suitable technique for introducing nucleic acids into cells (e.g., microinjection, electroporation, transfection, etc.). In some embodiments, introduction of one or more nucleic acid can be through the use of a vector and/or a vector system, accordingly, in some embodiments, compositions and system described herein comprise a vector and/or a vector system.

[0822] Vectors may be introduced directly to a host. In certain embodiments, host cells can be contacted with one or more vectors as described herein, and in certain embodiments, said vectors are taken up by the cells. Methods for contacting cells with vectors include but are not limited to electroporation, calcium chloride transfection, microinjection, lipofection, micro-injection, contact with the cell or particle that comprises a molecule of interest, or a package of cells or particles that comprise molecules of interest.

[0823] Components described herein can also be introduced directly to a host. For example, an engineered guide nucleic acid can be introduced to a host, specifically introduced into a host cell. Methods of introducing nucleic acids, such as RNA into cells include, but are not limited to direct injection, transfection, or any other method used for the introduction of nucleic acids.

[0824] Polypeptides (e.g., effector proteins) described herein can also be introduced directly to a host. In some embodiments, polypeptides described herein can be modified to promote introduction to a host. For example, polypeptides described herein can be modified to increase the solubility of the polypeptide. Such a polypeptide may optionally be fused to a polypeptide domain that increases solubility. The domain may be linked to the polypeptide through a defined protease cleavage site, such as TEV sequence which is cleaved by TEV protease. The linker may also include one or more flexible sequences, e.g. from 1 to 10 glycine residues. In some embodiments, the cleavage of the polypeptide is performed in a buffer that maintains solubility of the product, e.g. in the presence of from 0.5 to 2 M urea, in the presence of polypeptides and/or polynucleotides that increase solubility, and the like. Domains of interest include endosomolytic domains, e.g. influenza HA domain; and other polypeptides that aid in production, e.g. IF2 domain, GST domain, GRPE domain, and the like. In another example, the polypeptide can be modified to improve stability. For example, the polypeptides may be PEGylated, where the polyethyleneoxy group provides for enhanced lifetime in the blood stream. Polypeptides can also be modified to promote uptake by a host, such as a host cell. For example, a polypeptide described herein can be fused to a polypeptide permeant domain to promote uptake by a host cell. Any suitable permeant domains can be used in the non-integrating polypeptides of the present disclosure, including peptides, peptidomimetics, and non-peptide carriers. Examples include penetratin, a permeant peptide may be derived from the third alpha helix of Drosophila melanogaster transcription factor Antennapaedia; the HIV-1 t at basic region amino acid sequence, e.g., amino acids 49-57 of a naturally-occurring tat protein; and poly-arginine motifs, for example, the region of amino acids 34-56 of HIV-1 rev protein, nonaarginine, octa-arginine, and the like. The site at which the fusion is made may be selected in order to optimize the biological activity, secretion or binding characteristics of the polypeptide. The optimal site can be determined by suitable methods.

### Formulations for Introducing Systems and Compositions to a Host

[0825] Described herein are formulations of introducing systems and compositions described herein to a host. In some embodiments, such formulations, systems and compositions described herein comprise an effector protein and a carrier (e.g., excipient, diluent, vehicle, or filling agent).

[0826] In some aspects of the present invention the effector protein is provided in a pharmaceutical composition comprising the effector protein and any pharmaceutically acceptable excipient, carrier, or diluent. In some embodiments, a pharmaceutically acceptable excipient, carrier or diluent can describe any substance formulated alongside the active ingredient of a pharmaceutical composition that allows the active ingredient to retain biological activity and is non-reactive with the subject's immune system. Such a substance can be included for the purpose of long-term stabilization, bulking up solid formulations that contain potent active ingredients in small amounts, or to confer a therapeutic enhancement on the active ingredient in the final dosage form, such as facilitating absorption, reducing viscosity, or enhancing solubility. The selection of appropriate substance can depend upon the route of administration and the dosage form, as well as the active ingredient and other factors. Compositions having such substances can be formulated by well-known conventional methods (see, e.g., Remington's Pharmaceutical Sciences, 18th edition, A. Gennaro, ed., Mack Publishing Co., Easton, Pa., 1990; and Remington, The Science and Practice of Pharmacy 21st Ed. Mack Publishing, 2005).

[0827] In some embodiments, a pharmaceutically acceptable excipient, carrier or diluent, comprises any substance formulated alongside the active ingredient of a pharmaceutical composition that allows the active ingredient to retain biological activity and is non-reactive with the subject's immune system. Such a substance can be included for the purpose of long-term stabilization, bulking up solid formulations that contain potent active ingredients in small amounts, or to confer a therapeutic enhancement on the active ingredient in the final dosage form, such as facilitating absorption, reducing viscosity, or enhancing solubility. The selection of appropriate substance can depend upon the route of administration and the dosage form, as well as the active ingredient and other factors. Compositions having such substances can be formulated by well-known conventional methods (see, e.g., Remington's Pharmaceutical Sciences, 18th edition, A. Gennaro, ed., Mack Publishing Co., Easton, Pa., 1990; and Remington, The Science and Practice of Pharmacy 21st Ed. Mack Publishing, 2005).

### XI. Pharmaceutical Compositions and Modes of Delivery

[0828] Disclosed herein, in some aspects, are pharmaceutical compositions for modifying a target nucleic acid in a cell or a subject, comprising any one of the effector proteins, engineered effector proteins, fusion effector proteins, or guide nucleic acids as described herein and any combination thereof. In some embodiments, a subject can be a biological entity containing expressed genetic materials. The biological entity can be a plant, animal, or microorganism, including, for example, bacteria, viruses, fungi, and protozoa. The subject can be tissues, cells and their progeny of a biological entity obtained in vivo or cultured in vitro. The subject can be a mammal. The mammal can be a human. The subject may be diagnosed or suspected of being at high risk for a disease. In some instances, the subject is not necessarily diagnosed or suspected of being at high risk for the disease.

[0829] Also disclosed herein, in some aspects, are pharmaceutical compositions comprising a nucleic acid encoding any one of the effector proteins, engineered effector proteins, fusion effector proteins, or guide nucleic acids as described herein and any combination thereof. In some embodiments, pharmaceutical compositions comprise a plurality of guide nucleic acids. Pharmaceutical compositions may be used to modify a target nucleic acid or the expression thereof in a cell in vitro, in vivo or ex vivo.

[0830] In some embodiments, pharmaceutical compositions comprise one or more nucleic acids encoding a effector protein, fusion effector protein, fusion partner, a guide nucleic acid, or a combination thereof; and a pharmaceutically acceptable excipient, carrier or diluent.

[0831] The effector protein, fusion effector protein, fusion partner protein, or combination thereof may be any one of those described herein. The one or more nucleic acids may comprise a plasmid. The one or more nucleic acids may comprise a nucleic acid expression vector. The one or more nucleic acids may comprise a viral vector. In some embodiments, the viral vector is a lentiviral vector. In some embodiments, the vector is an adeno-associated viral (AAV) vector. In some embodiments, compositions, including pharmaceutical compositions, comprise a viral vector encoding a fusion effector protein and a guide nucleic acid, wherein at least a portion of the guide nucleic acid binds to the effector protein of the fusion effector protein.

[0832] In some embodiments, pharmaceutical compositions comprise a virus comprising a viral vector encoding a fusion effector protein, an effector protein, a fusion partner, a guide nucleic acid, or a combination thereof; and a pharmaceutically acceptable carrier or diluent. The virus may be a lentivirus. The virus may be an adenovirus. The virus may be a non-replicating virus. The virus may be an adeno-associated virus (AAV). The viral vector may be a retroviral vector. Retroviral vectors may include gamma-retroviral vectors such as vectors derived from the Moloney Murine Leukemia Virus (MoMLV, MMLV, MuLV, or MLV) or the Murine Stem cell Virus (MSCV) genome. Retroviral vectors may include lentiviral vectors such as those derived from the human immunodeficiency virus (HIV) genome. In some embodiments, the viral vector is a chimeric viral vector, comprising viral portions from two or more viruses. In some embodiments, the viral vector is a recombinant viral vector.

[0833] In some embodiments, when describing recombinant proteins, polypeptides, peptides and nucleic acids can describe proteins, polypeptides, peptides and nucleic acids that are products of various combinations of cloning, restriction, and/or ligation steps resulting in a construct having a structural coding or non-coding sequence distinguishable from endogenous nucleic acids found in natural systems. Generally, DNA sequences encoding the structural coding sequence can be assembled from cDNA fragments and short oligonucleotide linkers, or from a series of synthetic oligonucleotides, to provide a synthetic nucleic acid which is capable of being expressed from a recombinant transcriptional unit contained in a cell or in a cell-free transcription and translation system. Such sequences can be provided in the form of an open reading frame uninterrupted by internal non translated sequences, or introns, which are typically present in eukaryotic genes. Genomic DNA comprising the relevant sequences can also be used in the formation of a recombinant gene or transcriptional unit. Sequences of non-translated DNA may be present 5′ or 3′ from the open reading frame, where such sequences do not interfere with manipulation or expression of the coding regions and may act to modulate production of a desired product by various mechanisms. Thus, for example, a recombinant polynucleotide or a recombinant nucleic acid can describe one which is not naturally occurring, e.g., is made by the artificial combination of two otherwise separated segments of sequence through human intervention. This artificial combination is often accomplished by either chemical synthesis means, or by the artificial manipulation of isolated segments of nucleic acids, e.g., by genetic engineering techniques. Such is usually done to replace a codon with a redundant codon encoding the same or a conservative amino acid, while typically introducing or removing a sequence recognition site. Alternatively, it is performed to join together nucleic acid segments of desired functions to generate a desired combination of functions. Similarly, a recombinant polypeptide or recombinant protein a can describe one which is not naturally occurring, e.g., is made by the artificial combination of two otherwise separated segments of amino sequences through human intervention. Thus, for example, a polypeptide that includes a heterologous amino acid sequence is a recombinant polypeptide.

[0834] In some embodiments, the viral vector is an AAV. The AAV may be any AAV known in the art. In some embodiments, the viral vector corresponds to a virus of a specific serotype. In some examples, the serotype is selected from an AAV1 serotype, an AAV2 serotype, AAV3 serotype, an AAV4 serotype, AAV5 serotype, an AAV6 serotype, AAV7 serotype, an AAV8 serotype, an AAV9 serotype, an AAV10 serotype, an AAV11 serotype, and an AAV12 serotype. In some embodiments the AAV vector is a recombinant vector, a hybrid AAV vector, a chimeric AAV vector, a self-complementary AAV (scAAV) vector, a single-stranded AAV or any combination thereof scAAV genomes are generally known in the art and contain both DNA strands which can anneal together to form double-stranded DNA.

[0835] In some embodiments, methods of producing delivery vectors herein comprise packaging a nucleic acid encoding an effector protein and a guide nucleic acid, or a combination thereof, into an AAV vector. In some embodiments, methods of producing the delivery vector comprises, (a) contacting a cell with at least one nucleic acid encoding: (i) a guide nucleic acid; (ii) a Replication (Rep) gene; and (iii) a Capsid (Cap) gene that encodes an AAV capsid protein; (b) expressing the AAV capsid protein in the cell; (c) assembling an AAV particle; and (d) packaging a Cas effector encoding nucleic acid into the AAV particle, thereby generating an AAV delivery vector. In some embodiments, promoters, stuffer sequences, and any combination thereof may be packaged in the AAV vector. In some examples, the AAV vector can package 1, 2, 3, 4, or 5 guide nucleic acids or copies thereof. In some embodiments, the AAV vector comprises inverted terminal repeats, e.g., a 5′ inverted terminal repeat and a 3′ inverted terminal repeat. In some embodiments, the AAV vector comprises a mutated inverted terminal repeat that lacks a terminal resolution site.

[0836] In some embodiments, a hybrid AAV vector is produced by transcapsidation, e.g., packaging an inverted terminal repeat (ITR) from a first serotype into a capsid of a second serotype, wherein the first and second serotypes may be not the same. In some examples, the Rep gene and ITR from a first AAV serotype (e.g., AAV2) may be used in a capsid from a second AAV serotype (e.g., AAV9), wherein the first and second AAV serotypes may be not the same. As a non-limiting example, a hybrid AAV serotype comprising the AAV2 ITRs and AAV9 capsid protein may be indicated AAV2/9. In some examples, the hybrid AAV delivery vector comprises an AAV2/1, AAV2/2, AAV 2/4, AAV2/5, AAV2/8, or AAV2/9 vector.

[0837] In some embodiments, the AAV vector may be a chimeric AAV vector. In some embodiments, the chimeric AAV vector comprises an exogenous amino acid or an amino acid substitution, or capsid proteins from two or more serotypes. In some examples, a chimeric AAV vector may be genetically engineered to increase transduction efficiency, selectivity, or a combination thereof.

[0838] In some examples, the delivery vector may be a eukaryotic vector, a prokaryotic vector (e.g., a bacterial vector) a viral vector, or any combination thereof. In some embodiments, the delivery vehicle may be a non-viral vector. In some embodiments, the delivery vehicle may be a plasmid. In some embodiments, the plasmid comprises DNA. In some embodiments, the plasmid comprises RNA. In some examples, the plasmid comprises circular double-stranded DNA. In some examples, the plasmid may be linear. In some examples, the plasmid comprises one or more genes of interest and one or more regulatory elements. In some examples, the plasmid comprises a bacterial backbone containing an origin of replication and an antibiotic resistance gene or other selectable marker for plasmid amplification in bacteria. In some examples, the plasmid may be a minicircle plasmid. In some examples, the plasmid contains one or more genes that provide a selective marker to induce a target cell to retain the plasmid. In some examples, the plasmid may be formulated for delivery through injection by a needle carrying syringe. In some examples, the plasmid may be formulated for delivery via electroporation. In some examples, the plasmids may be engineered through synthetic or other suitable means known in the art. For example, in some embodiments, the genetic elements may be assembled by restriction digest of the desired genetic sequence from a donor plasmid or organism to produce ends of the DNA which may then be readily ligated to another genetic sequence.

[0839] In some embodiments, the vector is a non-viral vector, and a physical method or a chemical method is employed for delivery into the somatic cell. Exemplary physical methods include electroporation, gene gun, sonoporation, magnetofection, or hydrodynamic delivery. Exemplary chemical methods include delivery of the recombinant polynucleotide via liposomes such as, cationic lipids or neutral lipids; dendrimers; nanoparticles; or cell-penetrating peptides.

[0840] In some embodiments, a fusion effector protein as described herein is inserted into a vector. In some embodiments, the vector comprises one or more promoters, enhancers, ribosome binding sites, RNA splice sites, polyadenylation sites, a replication origin, and/or transcriptional terminator sequences.

[0841] In general, plasmids and vectors described herein comprise at least one promoter. In some embodiments, the promoters are constitutive promoters. In other embodiments, the promoters are inducible promoters. In additional embodiments, the promoters are prokaryotic promoters (e.g., drive expression of a gene in a prokaryotic cell). In some embodiments, the promoters are eukaryotic promoters, (e.g., drive expression of a gene in a eukaryotic cell). Exemplary promoters include, but are not limited to, CMV, EF1a, SV40, PGK1, Ubc, human beta actin, CAG, TRE, UAS, Ac5, polyhedron, CaMKIIa, GAL1-10, TEF1, GDS, ADH1, CaMV35S, Ubi, H1, U6, CaMV35S, SV40, CMV, and HSV TK promoter. In some embodiments, the promoter is CMV. In some embodiments, the promoter is EF1a. In some embodiments, the promoter is ubiquitin. In some embodiments, vectors are bicistronic or polycistronic vector (e.g., having or involving two or more loci responsible for generating a protein) having an internal ribosome entry site (IRES) is for translation initiation in a cap-independent manner.

[0842] In some embodiments, vectors comprise an enhancer Enhancers are nucleotide sequences that have the effect of enhancing promoter activity. In some embodiments, enhancers augment transcription regardless of the orientation of their sequence. In some embodiments, enhancers activate transcription from a distance of several kilo basepairs. Furthermore, enhancers are located optionally upstream or downstream of a gene region to be transcribed, and/or located within the gene, to activate the transcription. Exemplary enhancers include, but are not limited to, WPRE; CMV enhancers; the R-U5′ segment in LTR of HTLV-I (Mol. Cell. Biol., Vol. 8(1), p. 466-472, 1988); SV40 enhancer; the intron sequence between exons 2 and 3 of rabbit β-globin (Proc. Natl. Acad. Sci. USA., Vol. 78(3), p. 1527-31, 1981); and the genome region of human growth hormone (J Immunol., Vol. 155(3), p. 1286-95, 1995).

[0843] Pharmaceutical compositions described herein may comprise a salt. In some embodiments, the salt is a sodium salt. In some embodiments, the salt is a potassium salt. In some embodiments, the salt is a magnesium salt. In some embodiments, the salt is NaCl. In some embodiments, the salt is KNO3. In some embodiments, the salt is Mg2+SO42-.

[0844] Non-limiting examples of pharmaceutically acceptable carriers and diluents suitable for the pharmaceutical compositions disclosed herein include buffers (e.g., neutral buffered saline, phosphate buffered saline); carbohydrates (e.g., glucose, mannose, sucrose, dextran, mannitol); polypeptides or amino acids (e.g., glycine); antioxidants; chelating agents (e.g., EDTA, glutathione); adjuvants (e.g., aluminum hydroxide); surfactants (Polysorbate 80, Polysorbate 20, or Pluronic F68); glycerol; sorbitol; mannitol; polyethyleneglycol; and preservatives.

[0845] In some embodiments, pharmaceutical compositions are in the form of a solution (e.g., a liquid). The solution may be formulated for injection, e.g., intravenous or subcutaneous injection. In some embodiments, the pH of the solution is about 7, about 7.1, about 7.2, about 7.3, about 7.4, about 7.5, about 7.6, about 7.7, about 7.8, about 7.9, about 8, about 8.1, about 8.2, about 8.3, about 8.4, about 8.5, about 8.6, about 8.7, about 8.8, about 8.9, or about 9. In some embodiments, the pH is 7 to 7.5, 7.5 to 8, 8 to 8.5, 8.5 to 9, or 7 to 8.5. In some embodiments, the pH of the solution is less than 7. In some embodiments, the pH is greater than 7.

[0846] In some embodiments, pharmaceutical compositions comprise an: effector protein, fusion effector protein, fusion partner, a guide nucleic acid, or a combination thereof; and a pharmaceutically acceptable carrier or diluent. In some embodiments, pharmaceutical compositions comprise one or more nucleic acids encoding an: effector protein, fusion effector protein, fusion partner, a guide nucleic acid, or a combination thereof; and a pharmaceutically acceptable carrier or diluent. In some embodiments, guide nucleic acid can be a plurality of guide nucleic acids. In some embodiments, pharmaceutical compositions comprise a effector protein and a guide nucleic acid wherein the effector protein comprises a sequence that is at least 65%, at least 70%, at least 75%, at least 80%, at least 85%, at least 90%, at least 95%, at least 97%, or at least 98%, at least 99%, or 100% identical to any one of the sequences of 1-45, 202-293, and 728-731 and the guide nucleic acid comprises a nucleotide sequence of any one of the nucleotide sequences of SEQ ID NOS: 624, 628, 630, 634, 638, 641, 643, 645, 646, 630, 641, and 827-929.

### XII. Methods of Detecting a Target Nucleic Acid

[0847] Provided herein are methods of detecting target nucleic acids. Methods may comprise detecting target nucleic acids with compositions or systems described herein. Methods may comprise detecting a target nucleic acid with systems described herein that comprise a DETECTR assay. Methods may comprise detecting a target nucleic acid in a sample, e.g., a cell lysate, a biological fluid, or environmental sample. Methods may comprise detecting a target nucleic acid in a cell. In some instances, methods of detecting a target nucleic acid in a sample or cell comprises contacting the sample or cell with a D2S effector protein or a multimeric complex thereof, a guide nucleic acid, wherein at least a portion of the guide nucleic acid is complementary to at least a portion of the target nucleic acid, and a reporter nucleic acid that is cleaved in the presence of the D2S effector protein, the guide nucleic acid, and the target nucleic acid, and detecting a signal produced by cleavage of the reporter nucleic acid, thereby detecting the target nucleic acid in the sample. In some instances, methods result in transcollateral cleavage of the reporter nucleic acid. In some instances, methods result in cis cleavage of the reporter nucleic acid.

[0848] In some instances, the effector protein comprises an amino acid sequence that is at least is at least 70%, at least 75%, at least 80%, at least 85%, at least 90%, at least 92%, at least 95%, at least 97%, at least 98%, at least 99%, or 100% identical to any one of SEQ ID NOs: 1-45. In some instances, the effector protein comprises an amino acid sequence that is at least is at least 70%, at least 75%, at least 80%, at least 85%, at least 90%, at least 92%, at least 95%, at least 97%, at least 98%, at least 99%, or 100% identical to any one of SEQ ID NOs: 1-45, 202-293, or 728-731. In some instances, the amino acid sequence of the effector protein is at least 70%, at least 75%, at least 80%, at least 85%, at least 90%, at least 92%, at least 95%, at least 97%, at least 98%, at least 99%, or 100% identical to any one of SEQ ID NOs: 1-45. In some instances, the amino acid sequence of the effector protein is at least 70%, at least 75%, at least 80%, at least 85%, at least 90%, at least 92%, at least 95%, at least 97%, at least 98%, at least 99%, or 100% identical to any one of SEQ ID NOs: 1-45, 202-293, or 728-731. In some instances, the nucleobase sequence of the guide is at least 70%, at least 75%, at least 80%, at least 85%, at least 90%, at least 92%, at least 95%, at least 97%, at least 98%, at least 99%, or 100% identical to any one of SEQ ID NOs: 149-153. In some instances, the guide comprises a crRNA nucleobase sequence that is at least 70%, at least 75%, at least 80%, at least 85%, at least 90%, at least 92%, at least 95%, or 100% identical to any one of SEQ ID NOs: 46-90. In some instances, the guide comprises a tracrRNA nucleobase sequence that is at least 70%, at least 75%, at least 80%, at least 85%, at least 90%, at least 92%, at least 95%, or 100% identical to any one of SEQ ID NOs: 91-148.

[0849] Methods may comprise contacting the sample to a complex comprising a guide nucleic acid comprising a segment that is reverse complementary to a segment of the target nucleic acid and a D2S effector protein that exhibits sequence independent cleavage upon forming a complex comprising the segment of the guide nucleic acid binding to the segment of the target nucleic acid; and assaying for a signal indicating cleavage of at least some protein-nucleic acids of a population of protein-nucleic acids, wherein the signal indicates a presence of the target nucleic acid in the sample and wherein absence of the signal indicates an absence of the target nucleic acid in the sample.

[0850] Methods may comprise contacting the sample comprising the target nucleic acid with a guide nucleic acid targeting a target nucleic acid segment, a D2S effector protein capable of being activated when complexed with the guide nucleic acid and the target nucleic acid segment, a single stranded nucleic acid of a reporter comprising a detection moiety, wherein the nucleic acid of a reporter is capable of being cleaved by the activated D2S effector protein, thereby generating a first detectable signal, cleaving the single stranded nucleic acid of a reporter using the D2S effector protein that cleaves as measured by a change in color, and measuring the first detectable signal on the support medium.

[0851] Methods may comprise contacting the sample or cell with a D2S effector protein or a multimeric complex thereof and a guide nucleic acid at a temperature of at least about 25° C., at least about 30° C., at least about 35° C., at least about 40° C., at least about 50° C., or at least about 65° C. In some instances, the temperature is not greater than 80° C. In some instances, the temperature is about 25° C., about 30° C., about 35° C., about 40° C., about 45° C., about 50° C., about 55° C., about 60° C., about 65° C., or about 70° C. In some instances, the temperature is about 25° C. to about 45° C., about 35° C. to about 55° C., or about 55° C. to about 65° C.

[0852] Methods may comprise cleaving a strand of a single-stranded target nucleic acid with a D2S or a multimeric complex thereof, as assessed with an in vitro cis-cleavage assay. A cleavage assay can comprise an assay designed to visualize, quantitate or identify cleavage of a nucleic acid. In some cases, the cleavage activity may be cis-cleavage activity. In some cases, the cleavage activity may be trans-cleavage activity. An example of such an assay (an in vitro cis-cleavage assay). An example of such an assay may follow a procedure comprising: (i) providing equimolar (e.g., 500 nM) amounts of a D2S effector protein comprising at least 70% sequence identity to any one of SEQ ID NOs: 1-45 and a guide nucleic acid at 40 to 45° C. for 5 minutes in pH 7.5 Tris-HCl buffer, 40 mM NaCl, 2 mM Ca(NO3)2, 1 mM BME, thereby forming a ribonucleoprotein complex comprising a dimer of the D2S effector protein and the guide nucleic acid; (ii) adding linear dsDNA comprising a nucleic acid sequence targeted by the guide nucleic acid and adjacent to a PAM comprising the sequence 5′-TTTA-3′; (iii) incubating the mixture at 45° C. for 20 minutes, thereby enabling cleavage of the plasmid; (iv) quenching the reaction with EDTA and a protease; and (v) analyzing the reaction products (e.g., viewing the cleaved and uncleaved linear dsDNA with gel electrophoresis).

[0853] In some embodiments, cleave, cleaving, and cleavage, with reference to a nucleic acid molecule or nuclease activity of an effector protein, comprise the hydrolysis of a phosphodiester bond of a nucleic acid molecule that results in breakage of that bond. The result of this breakage can be a nick (hydrolysis of a single phosphodiester bond on one side of a double-stranded molecule), single strand break (hydrolysis of a single phosphodiester bond on a single-stranded molecule) or double strand break (hydrolysis of two phosphodiester bonds on both sides of a double-stranded molecule) depending upon whether the nucleic acid molecule is single-stranded (e.g., ssDNA or ssRNA) or double-stranded (e.g., dsDNA) and the type of nuclease activity being catalyzed by the effector protein.

[0854] In some cases, there is a threshold of detection for methods of detecting target nucleic acids. In some instances, methods are not capable of detecting target nucleic acids that are present in a sample or solution at a concentration less than or equal to 10 nM. The term “threshold of detection” is used herein to describe the minimal amount of target nucleic acid that must be present in a sample in order for detection to occur. For example, when a threshold of detection is 10 nM, then a signal can be detected when a target nucleic acid is present in the sample at a concentration of 10 nM or more. In some cases, the threshold of detection is less than or equal to 5 nM, 1 nM, 0.5 nM, 0.1 nM, 0.05 nM, 0.01 nM, 0.005 nM, 0.001 nM, 0.0005 nM, 0.0001 nM, 0.00005 nM, 0.00001 nM, 10 pM, 1 pM, 500 fM, 250 fM, 100 fM, 50 fM, 10 fM, 5 fM, 1 fM, 500 attomole (aM), 100 aM, 50 aM, 10 aM, or 1 aM. In some cases, the threshold of detection is in a range of from 1 aM to 1 nM, 1 aM to 500 pM, 1 aM to 200 pM, 1 aM to 100 pM, 1 aM to 10 pM, 1 aM to 1 pM, 1 aM to 500 fM, 1 aM to 100 fM, 1 aM to 1 fM, 1 aM to 500 aM, 1 aM to 100 aM, 1 aM to 50 aM, 1 aM to 10 aM, 10 aM to 1 nM, 10 aM to 500 pM, 10 aM to 200 pM, 10 aM to 100 pM, 10 aM to 10 pM, 10 aM to 1 pM, 10 aM to 500 fM, 10 aM to 100 fM, 10 aM to 1 fM, 10 aM to 500 aM, 10 aM to 100 aM, 10 aM to 50 aM, 100 aM to 1 nM, 100 aM to 500 pM, 100 pM to 200 pM, 100 aM to 100 pM, 100 aM to 10 pM, 100 aM to 1 pM, 100 aM to 500 fM, 100 aM to 100 fM, 100 aM to 1 fM, 100 aM to 500 aM, 500 aM to 1 nM, 500 aM to 500 pM, 500 aM to 200 pM, 500 aM to 100 pM, 500 aM to 10 pM, 500 aM to 1 pM, 500 aM to 500 fM, 500 aM to 100 fM, 500 aM to 1 fM, 1 fM to 1 nM, 1 fM to 500 pM, 1 fM to 200 pM, 1 fM to 100 pM, 1 fM to 10 pM, 1 fM to 1 pM, 10 fM to 1 nM, 10 fM to 500 pM, 10 fM to 200 pM, 10 fM to 100 pM, 10 fM to 10 pM, 10 fM to 1 pM, 500 fM to 1 nM, 500 fM to 500 pM, 500 fM to 200 pM, 500 fM to 100 pM, 500 fM to 10 pM, 500 fM to 1 pM, 800 fM to 1 nM, 800 fM to 500 pM, 800 fM to 200 pM, 800 fM to 100 pM, 800 fM to 10 pM, 800 fM to 1 pM, 1 pM to 1 nM, 1 pM to 500 pM, 1 pM to 200 pM, 1 pM to 100 pM, or 1 pM to 10 pM. In some cases, the threshold of detection in a range of from 800 fM to 100 pM, 1 pM to 10 pM, 10 fM to 500 fM, 10 fM to 50 fM, 50 fM to 100 fM, 100 fM to 250 fM, or 250 fM to 500 fM. In some cases, the threshold of detection is in a range of from 2 aM to 100 pM, from 20 aM to 50 pM, from 50 aM to 20 pM, from 200 aM to 5 pM, or from 500 aM to 2 pM. In some cases, the minimum concentration at which a target nucleic acid is detected in a sample is in a range of from 1 aM to 1 nM, 10 aM to 1 nM, 100 aM to 1 nM, 500 aM to 1 nM, 1 fM to 1 nM, 1 fM to 500 pM, 1 fM to 200 pM, 1 fM to 100 pM, 1 fM to 10 pM, 1 fM to 1 pM, 10 fM to 1 nM, 10 fM to 500 pM, 10 fM to 200 pM, 10 fM to 100 pM, 10 fM to 10 pM, 10 fM to 1 pM, 500 fM to 1 nM, 500 fM to 500 pM, 500 fM to 200 pM, 500 fM to 100 pM, 500 fM to 10 pM, 500 fM to 1 pM, 800 fM to 1 nM, 800 fM to 500 pM, 800 fM to 200 pM, 800 fM to 100 pM, 800 fM to 10 pM, 800 fM to 1 pM, 1 pM to 1 nM, 1 pM to 500 pM, from 1 pM to 200 pM, 1 pM to 100 pM, or 1 pM to 10 pM. In some cases, the minimum concentration at which a target nucleic acid is detected in a sample is in a range of from 2 aM to 100 pM, from 20 aM to 50 pM, from 50 aM to 20 pM, from 200 aM to 5 pM, or from 500 aM to 2 pM. In some cases, the minimum concentration at which a single stranded target nucleic acid can be detected in a sample is in a range of from 1 aM to 100 pM. In some cases, the minimum concentration at which a target nucleic acid can be detected in a sample is in a range of from 1 fM to 100 pM. In some cases, the minimum concentration at which a single stranded target nucleic acid can be detected in a sample is in a range of from 10 fM to 100 pM. In some cases, the minimum concentration at which a single stranded target nucleic acid can be detected in a sample is in a range of from 800 fM to 100 pM. In some cases, the minimum concentration at which a single stranded target nucleic acid can be detected in a sample is in a range of from 1 pM to 10 pM. In some cases, the devices, systems, fluidic devices, kits, and methods described herein detect a target single-stranded nucleic acid in a sample comprising a plurality of nucleic acids such as a plurality of non-target nucleic acids, where the target single-stranded nucleic acid is present at a concentration as low as 1 aM, 10 aM, 100 aM, 500 aM, 1 fM, 10 fM, 500 fM, 800 fM, 1 pM, 10 pM, 100 pM, or 1 pM.

[0855] In some instances, the target nucleic acid is present in a cleavage reaction at a concentration of about 10 nM, about 20 nM, about 30 nM, about 40 nM, about 50 nM, about 60 nM, about 70 nM, about 80 nM, about 90 nM, about 100 nM, about 200 nM, about 300 nM, about 400 nM, about 500 nM, about 600 nM, about 700 nM, about 800 nM, about 900 nM, about 1 μM, about 10 μM, or about 100 μM. In some instances, the target nucleic acid is present in the cleavage reaction at a concentration of from 10 nM to 20 nM, from 20 nM to 30 nM, from 30 nM to 40 nM, from 40 nM to 50 nM, from 50 nM to 60 nM, from 60 nM to 70 nM, from 70 nM to 80 nM, from 80 nM to 90 nM, from 90 nM to 100 nM, from 100 nM to 200 nM, from 200 nM to 300 nM, from 300 nM to 400 nM, from 400 nM to 500 nM, from 500 nM to 600 nM, from 600 nM to 700 nM, from 700 nM to 800 nM, from 800 nM to 900 nM, from 900 nM to 1 μM, from 1 μM to 10 μM, from 10 μM to 100 μM, from 10 nM to 100 nM, from 10 nM to 1 μM, from 10 nM to 10 μM, from 10 nM to 100 μM, from 100 nM to 1 μM, from 100 nM to 10 μM, from 100 nM to 100 μM, or from 1 μM to 100 μM. In some instances, the target nucleic acid is present in the cleavage reaction at a concentration of from 20 nM to 50 μM, from 50 nM to 20 μM, or from 200 nM to 5 μM.

[0856] In some cases, methods detect a target nucleic acid in less than 60 minutes. In some cases, methods detect a target nucleic acid in less than about 120 minutes, less than about 110 minutes, less than about 100 minutes, less than about 90 minutes, less than about 80 minutes, less than about 70 minutes, less than about 60 minutes, less than about 55 minutes, less than about 50 minutes, less than about 45 minutes, less than about 40 minutes, less than about 35 minutes, less than about 30 minutes, less than about 25 minutes, less than about 20 minutes, less than about 15 minutes, less than about 10 minutes, less than about 5 minutes, less than about 4 minutes, less than about 3 minutes, less than about 2 minutes, or less than about 1 minute.

[0857] In some cases, methods require at least about 120 minutes, at least about 110 minutes, at least about 100 minutes, at least about 90 minutes, at least about 80 minutes, at least about 70 minutes, at least about 60 minutes, at least about 55 minutes, at least about 50 minutes, at least about 45 minutes, at least about 40 minutes, at least about 35 minutes, at least about 30 minutes, at least about 25 minutes, at least about 20 minutes, at least about 15 minutes, at least about 10 minutes, or at least about 5 minutes to detect a target nucleic acid. In some cases, the sample is contacted with the reagents for from 5 minutes to 120 minutes, from 5 minutes to 100 minutes, from 10 minutes to 90 minutes, from 15 minutes to 45 minutes, or from 20 minutes to 35 minutes.

[0858] In some cases, methods of detecting are performed in less than 10 hours, less than 9 hours, less than 8 hours, less than 7 hours, less than 6 hours, less than 5 hours, less than 4 hours, less than 3 hours, less than 2 hours, less than 1 hour, less than 50 minutes, less than 45 minutes, less than 40 minutes, less than 35 minutes, less than 30 minutes, less than 25 minutes, less than 20 minutes, less than 15 minutes, less than 10 minutes, less than 9 minutes, less than 8 minutes, less than 7 minutes, less than 6 minutes, or less than 5 minutes. In some cases, methods of detecting are performed in about 5 minutes to about 10 hours, about 10 minutes to about 8 hours, about 15 minutes to about 6 hours, about 20 minutes to about 5 hours, about 30 minutes to about 2 hours, or about 45 minutes to about 1 hour.

[0859] Methods may comprise detecting a detectable signal within 5 minutes of contacting the sample and/or the target nucleic acid with the guide nucleic acid and/or the D2S effector protein. In some cases, detecting occurs within 1, 2, 3, 4, 5, 6, 7, 8, 9, 10, 11, 12, 13, 14, 15, 20, 25, 30, 35, 40, 45, 50, 55, 60, 70, 80, 90, 100, 110, or 120 minutes of contacting the target nucleic acid. In some instances, detecting occurs within 1 to 120, 5 to 100, 10 to 90, 15 to 80, 20 to 60, or 30 to 45 minutes of contacting the target nucleic acid.

### Amplification of a Target Nucleic Acid

[0860] Methods may comprise amplifying a target nucleic acid for detection using any of the compositions or systems described herein. Amplifying may comprise changing the temperature of the amplification reaction, also known as thermal amplification (e.g., PCR). Amplifying may be performed at essentially one temperature, also known as isothermal amplification. Amplifying may improve at least one of sensitivity, specificity, or accuracy of the detection of the target nucleic acid.

[0861] Amplifying may comprise subjecting a target nucleic acid to an amplification reaction selected from transcription mediated amplification (TMA), helicase dependent amplification (HDA), or circular helicase dependent amplification (cHDA), strand displacement amplification (SDA), recombinase polymerase amplification (RPA), loop mediated amplification (LAMP), exponential amplification reaction (EXPAR), rolling circle amplification (RCA), ligase chain reaction (LCR), simple method amplifying RNA targets (SMART), single primer isothermal amplification (SPIA), multiple displacement amplification (MDA), nucleic acid sequence based amplification (NASBA), hinge-initiated primer-dependent amplification of nucleic acids (HIP), nicking enzyme amplification reaction (NEAR), and improved multiple displacement amplification (IMDA).

[0862] In some instances, amplification of the target nucleic acid comprises modifying the sequence of the target nucleic acid. For example, amplification may be used to insert a PAM sequence into a target nucleic acid that lacks a PAM sequence. In some cases, amplification may be used to increase the homogeneity of a target nucleic acid in a sample. For example, amplification may be used to remove a nucleic acid variation that is not of interest in the target nucleic acid sequence.

[0863] Amplifying may take 1, 2, 3, 4, 5, 6, 7, 8, 9, 10, 11, 12, 13, 14, 15, 16, 17, 18, 19, 20, 25, 30, 40, 50, or 60 minutes. Amplifying may be performed at a temperature of around 20-45° C. Amplifying may be performed at a temperature of less than about 20° C., less than about 25° C., less than about 30° C., 35° C., less than about 37° C., less than about 40° C., or less than about 45° C. The nucleic acid amplification reaction may be performed at a temperature of at least about 20° C., at least about 25° C., at least about 30° C., at least about 35° C., at least about 37° C., at least about 40° C., or at least about 45° C.

### Certain Methods of Detection

[0864] An illustrative method for detecting a target nucleic acid molecule in a sample comprises contacting the sample comprising the target nucleic acid molecule with (i) a D2S effector protein comprising at least 75% sequence identity to a sequence selected from the group consisting of SEQ ID NOs: 1-45, 202-293, or 728-731; (ii) an engineered guide nucleic acid comprising a region that binds to the effector protein and an additional region that binds to the target nucleic acid; and (iii) a labeled, single stranded RNA reporter; cleaving the labeled single stranded RNA reporter by the effector protein to release a detectable label; and detecting the target nucleic acid by measuring a signal from the detectable label. In some instances, the nucleobase sequence of the guide nucleic acid is at least 70%, at least 75%, at least 80%, at least 85%, at least 90%, at least 92%, at least 95%, at least 97%, at least 98%, at least 99%, or 100% identical to any one of SEQ ID NOs: 149-153. In some instances, the guide nucleic acid comprises a crRNA sequence that is at least 70%, at least 75%, at least 80%, at least 85%, at least 90%, at least 92%, at least 95%, or 100% identical to any one of SEQ ID NOs: 46-90. In some instances, the guide nucleic acid comprises a tracrRNA sequence that is at least 70%, at least 75%, at least 80%, at least 85%, at least 90%, at least 92%, at least 95%, or 100% identical to any one of SEQ ID NOs: 91-148.

[0865] A further illustrative method for detecting a target nucleic acid molecule in a sample comprises contacting the sample comprising the target nucleic acid molecule with (i) a dimeric protein complex comprising a D2S effector protein comprising at least 75% sequence identity to a sequence selected from the group consisting of SEQ ID NOs: 1-45, 202-293, or 728-731; (ii) an engineered guide nucleic acid comprising a first region that binds to the target nucleic acid; (iii) a nucleic acid comprising a first region that binds to the effector protein and an additional region that hybridizes to second region of the engineered guide nucleic acid; and (iv) a labeled, single stranded RNA reporter; cleaving the labeled single stranded RNA reporter by the effector protein to release a detectable label; and detecting the target nucleic acid by measuring a signal from the detectable label. In some instances, the nucleobase sequence of the guide nucleic acid is at least 70%, at least 75%, at least 80%, at least 85%, at least 90%, at least 92%, at least 95%, at least 97%, at least 98%, at least 99%, or 100% identical to any one of SEQ ID NOs: 149-153. In some instances, the guide nucleic acid comprises a crRNA sequence that is at least 70%, at least 75%, at least 80%, at least 85%, at least 90%, at least 92%, at least 95%, or 100% identical to any one of SEQ ID NOs: 46-90. In some instances, the guide nucleic acid comprises a tracrRNA sequence that is at least 70%, at least 75%, at least 80%, at least 85%, at least 90%, at least 92%, at least 95%, or 100% identical to any one of SEQ ID NOs: 91-148.

### XIII. Methods of Nucleic Acid Editing

[0866] Provided herein are methods of editing target nucleic acids. In general, editing refers to modifying the nucleobase sequence of a target nucleic acid. However, compositions and systems disclosed herein may also be capable of making epigenetic modifications of target nucleic acids. D2S effector proteins, multimeric complexes thereof and systems described herein may be used for editing or modifying a target nucleic acid. Editing a target nucleic acid may comprise one or more of cleaving the target nucleic acid, deleting one or more nucleotides of the target nucleic acid, inserting one or more nucleotides into the target nucleic acid, mutating one or more nucleotides of the target nucleic acid, or modifying (e.g., methylating, demethylating, deaminating, or oxidizing) of one or more nucleotides of the target nucleic acid.

[0867] Methods of editing may comprise contacting a target nucleic acid with a D2S effector protein and a guide nucleic acid, wherein the effector protein comprises an amino acid sequence that is at least 70%, at least 75%, at least 80%, at least 85%, at least 90%, at least 95%, at least 97%, or at least 98%, at least 99%, or 100% identical to any one of SEQ ID NOs: 1-45, 202-293, or 728-731. In some instances, the nucleobase sequence of the guide nucleic acid is at least 70%, at least 75%, at least 80%, at least 85%, at least 90%, at least 92%, at least 95%, at least 97%, at least 98%, at least 99%, or 100% identical to any one of SEQ ID NOs: 149-153. In some instances, the guide nucleic acid comprises a crRNA sequence that is at least 70%, at least 75%, at least 80%, at least 85%, at least 90%, at least 92%, at least 95%, or 100% identical to any one of SEQ ID NOs: 46-90. In some instances, the guide nucleic acid comprises a tracrRNA sequence that is at least 70%, at least 75%, at least 80%, at least 85%, at least 90%, at least 92%, at least 95%, or 100% identical to any one of SEQ ID NOs: 91-148.

[0868] Editing may introduce a mutation (e.g., point mutations, deletions) in a target nucleic acid relative to a corresponding wildtype nucleobase sequence. Editing may remove or correct a disease-causing mutation in a nucleic acid sequence to produce a corresponding wildtype nucleobase sequence. Editing may remove/correct point mutations, deletions, null mutations, or tissue-specific mutations in a target nucleic acid. Editing may be used to generate gene knock-out, gene knock-in, gene editing, gene tagging, or a combination thereof. Methods of the disclosure may be targeted to any locus in a genome of a cell.

[0869] Editing may comprise single stranded cleavage, double stranded cleavage, donor nucleic acid insertion, epigenetic modification (e.g., methylation, demethylation, acetylation, or deacetylation), or a combination thereof. In some instances, cleavage (single-stranded or double-stranded) is site-specific, meaning cleavage occurs at a specific site in the target nucleic acid, often within the region of the target nucleic acid that hybridizes with the guide nucleic acid spacer region. In some cases, the D2S effector proteins introduce a single-stranded break in a target nucleic acid to produce a cleaved nucleic acid. In some cases, the effector protein is capable of introducing a break in a single stranded RNA (ssRNA). The D2S effector protein may be coupled to a guide nucleic acid that targets a particular region of interest in the ssRNA. In some instances, the target nucleic acid, and the resulting cleaved nucleic acid is contacted with a nucleic acid for homologous recombination (e.g., homology directed repair (HDR)) or non-homologous end joining (NHEJ). In some cases, a double-stranded break in the target nucleic acid may be repaired (e.g., by NHEJ or HDR) without insertion of a donor template, such that the repair results in an indel in the target nucleic acid at or near the site of the double-stranded break.

[0870] In some instances, the D2S effector protein is fused to a chromatin-modifying enzyme. In some cases, the fusion protein chemically modifies the target nucleic acid, for example by methylating, demethylating, or acetylating the target nucleic acid in a sequence specific or non-specific manner.

[0871] Methods may comprise use of two or more D2S effector proteins. An illustrative method for introducing a break in a target nucleic acid comprises contacting the target nucleic acid with: (a) a first engineered guide nucleic acid comprising a region that binds to a first D2S effector protein, wherein the effector protein comprises at least 75% sequence identity to a sequence selected from the group consisting of SEQ ID NOs: 1-45, 202-293, or 728-731; and (b) a second engineered guide nucleic acid comprising a region that binds to a second D2S effector protein, wherein the effector protein comprises at least 75% sequence identity to a sequence selected from the group consisting of SEQ ID NOs: 1-45, 202-293, or 728-731, wherein the first engineered guide nucleic acid comprises an additional region that binds to the target nucleic acid and wherein the second engineered guide nucleic acid comprises an additional region that binds to the target nucleic acid. In some instances, the nucleobase sequence of the guide nucleic acid is at least 70%, at least 75%, at least 80%, at least 85%, at least 90%, at least 92%, at least 95%, at least 97%, at least 98%, at least 99%, or 100% identical to any one of SEQ ID NOs: 149-153. In some instances, the guide nucleic acid comprises a crRNA sequence that is at least 70%, at least 75%, at least 80%, at least 85%, at least 90%, at least 92%, at least 95%, or 100% identical to any one of SEQ ID NOs: 46-90. In some instances, the guide nucleic acid comprises a tracrRNA sequence that is at least 70%, at least 75%, at least 80%, at least 85%, at least 90%, at least 92%, at least 95%, or 100% identical to any one of SEQ ID NOs: 91-148.

[0872] In some instances, editing a target nucleic acid comprises genome editing. Genome editing may comprise modifying a genome, chromosome, plasmid, or other genetic material of a cell or organism. In some instances, the genome, chromosome, plasmid, or other genetic material of the cell or organism is modified in vivo. In some instances, the genome, chromosome, plasmid, or other genetic material of the cell or organism is modified in a cell. In some instances, the genome, chromosome, plasmid, or other genetic material of the cell or organism is modified in vitro. For example, a plasmid may be modified in vitro using a composition described herein and introduced into a cell or organism. In some instances, modifying a target nucleic acid may comprise deleting a sequence from a target nucleic acid. For example, a mutated sequence or a sequence associated with a disease may be removed from a target nucleic acid. In some instances, modifying a target nucleic acid may comprise replacing a sequence in a target nucleic acid with a second sequence. For example, a mutated sequence or a sequence associated with a disease may be replaced with a second sequence lacking the mutation or that is not associated with the disease. In some instances, modifying a target nucleic acid may comprise introducing a sequence into a target nucleic acid. For example, a beneficial sequence or a sequence that may reduce or eliminate a disease may be inserted into the target nucleic acid.

[0873] In some instances, methods comprise inserting a donor nucleic acid into a cleaved target nucleic acid. The donor nucleic acid may be inserted at a specified (e.g., effector protein targeted) point within the target nucleic acid. In some instances, methods comprise contacting a target nucleic acid with a D2S effector protein comprising an amino acid sequence that is at least 70%, at least 75%, at least 80%, at least 85%, at least 90%, at least 95%, at least 97%, at least 98%, at least 99%, or 100% identical to any one of SEQ ID NOs: 1-45, 202-293, or 728-731, thereby introducing a single-stranded break in the target nucleic acid; contacting the target nucleic acid with a second effector protein, optionally comprising an amino acid sequence that is at least 70%, at least 75%, at least 80%, at least 85%, at least 90%, at least 95%, at least 97%, at least 98%, or at least 99% identical to any one of SEQ ID NOs: 11-45, 202-293, or 728-731, to generate a second cleavage site in the target nucleic acid, ligating the regions flanking the first and second cleavage site, optionally through NHEJ or single-strand annealing, thereby resulting in the excision of a portion of the target nucleic acid between the first and second cleavage sites from the target nucleic acid; and contacting the target nucleic acid with a donor nucleic acid for homologous recombination, optionally via HDR or NHEJ, thereby introducing a new sequence into the target nucleic acid (e.g., at a cleavage site or in between two cleavage sites).

[0874] In some cases, methods comprise editing a target nucleic acid with two or more effector proteins. Editing a target nucleic acid may comprise introducing a two or more single-stranded breaks in a target nucleic acid. In some instances, a break may be introduced by contacting a target nucleic acid with an effector protein and a guide nucleic acid. The guide nucleic acid may bind to the effector protein, e.g., a D2S effector protein, and hybridize to a region of the target nucleic acid, thereby recruiting the effector protein to the region of the target nucleic acid. Binding of the effector protein to the guide nucleic acid and the region of the target nucleic acid may activate the effector protein, and the effector protein may introduce a break (e.g., a single stranded break) in the region of the target nucleic acid. In some instances, modifying a target nucleic acid may comprise introducing a first break in a first region of the target nucleic acid and a second break in a second region of the target nucleic acid. For example, modifying a target nucleic acid may comprise contacting a target nucleic acid with a first guide nucleic acid that binds to a first effector protein and hybridizes to a first region of the target nucleic acid and a second guide nucleic acid that binds to a second programmable nickase and hybridizes to a second region of the target nucleic acid. The first effector protein, e.g., a D2S effector protein, may introduce a first break in a first strand at the first region of the target nucleic acid, and the second effector protein may introduce a second break in a second strand at the second region of the target nucleic acid. In some instances, a segment of the target nucleic acid between the first break and the second break may be removed, thereby modifying the target nucleic acid. In some instances, a segment of the target nucleic acid between the first break and the second break may be replaced (e.g., with donor nucleic acid), thereby modifying the target nucleic acid. In some instances, the D2S effector protein comprises an amino acid sequence that is at least 70%, at least 75%, at least 80%, at least 85%, at least 90%, at least 95%, at least 97%, at least 98%, at least 99%, or 100% identical to any one of SEQ ID NOs: 1-45, 202-293, or 728-731. In some instances, the nucleobase sequence of the guide nucleic acid is at least 70%, at least 75%, at least 80%, at least 85%, at least 90%, at least 92%, at least 95%, at least 97%, at least 98%, at least 99%, or 100% identical to any one of SEQ ID NOs: 149-153. In some instances, the guide nucleic acid comprises a crRNA sequence that is at least 70%, at least 75%, at least 80%, at least 85%, at least 90%, at least 95%, or 100% identical to any one of SEQ ID NOs: 46-90. In some instances, the guide nucleic acid comprises a tracrRNA sequence that is at least 70%, at least 75%, at least 80%, at least 85%, at least 90%, at least 92%, at least 95%, or 100% identical to any one of SEQ ID NOs: 91-148.

[0875] Base editing is a genome editing method that directly generates precise nucleotide changes in genomic DNA or RNA without generating DSBs, requiring a DNA donor template, or relying on cellular homology-directed repair (HDR). In general, base editors comprise a base editing enzyme (e.g., a deaminase) fused to a catalytically inactive CRISPR-associated (Cas) protein, wherein the catalytically inactive CRISPR-associated (Cas) protein is coupled to a guide nucleic acid that imparts activity or sequence selectivity to the base editor. In some embodiments, the effector protein is a catalytically inactive effector protein. In some embodiments, the effector protein comprises an amino acid sequence that is at least 75%, at least 80%, at least 85%, at least 90%, at least 95%, at least 98%, at least 99%, or 100% identical to any one of SEQ ID NOs: 728, 729, 730, or 731.

[0876] In some embodiments, the amino acid sequence of the effector protein is modified relative to a naturally-occurring effector protein. Such modified effector proteins may be referred to as an engineered effector protein. In some embodiments, the engineered effector protein has been modified to inactivate a catalytically active nuclease domain (e.g., a RuvC domain, HNH domain) of the naturally-occurring effector protein. In some embodiments, the engineered effector protein has been modified to reduce the activity of a catalytically active nuclease domain of the naturally-occurring effector protein. The engineered effector protein may have less than 90%, less than 80%, less than 70%, less than 60%, less than 50%, less than 40%, less than 30%, less than 20%, less than 10%, less than 5%, or less than 1% of the nucleic acid-cleaving activity as compared to the naturally-occurring effector protein as compared in a cleavage assay. In some embodiments, the effector protein has been modified to comprise at least 1, at least 2, at least 3, at least 4, or at least 5 amino acid modifications relative to the non-modified version (e.g. wild-type of naturally occurring version) of the effector protein. The amino acid modification(s) may comprise a deletion, insertion, or substitution of an amino acid.

[0877] In some cases, editing is achieved by fusing an effector protein, e.g., a D2S effector protein, to a heterologous sequence. The heterologous sequence may be a suitable fusion partner, e.g., a protein that provides recombinase activity by acting on the target nucleic acid sequence. In some instances, the fusion protein comprises a D2S effector protein fused to a heterologous sequence by a linker. The heterologous sequence or fusion partner may be a base editing domain. The base editing domain may be an ADAR1/2 or any functional variant thereof. The heterologous sequence or fusion partner may be fused to the C-terminus, N-terminus, or an internal portion (e.g., a portion other than the N- or C-terminus) of the D2S effector protein. The heterologous sequence or fusion partner may be fused to the D2S effector protein by a linker. A linker may be a peptide linker or a non-peptide linker. In some instances, the linker is an XTEN linker. In some instances, the linker comprises one or more repeats a tri-peptide GGS (SEQ ID NO: 179). In some instances, the linker is from 1 to 100 amino acids in length. In some instances, the linker is more 100 amino acids in length. In some instances, the linker is from 10 to 27 amino acids in length. A non-peptide linker may be a polyethylene glycol (PEG), polypropylene glycol (PPG), co-poly(ethylene/propylene) glycol, polyoxyethylene (POE), polyurethane, polyphosphazene, polysaccharides, dextran, polyvinyl alcohol, polyvinylpyrrolidones, polyvinyl ethyl ether, polyacrylamide, polyacrylate, polycyanoacrylates, lipid polymers, chitins, hyaluronic acid, heparin, or an alkyl linker.

[0878] In some embodiments, heterologous comprises a nucleotide or polypeptide sequence that is not found in a native nucleic acid or protein, respectively. In some embodiments, fusion proteins comprise an effector protein and a fusion partner protein, wherein the fusion partner protein is heterologous to an effector protein. These fusion proteins can comprise a heterologous protein. A protein that is heterologous to the effector protein is a protein that is not covalently linked via an amide bond to the effector protein in nature. In some embodiments, a heterologous protein is not encoded by a species that encodes the effector protein.

[0879] Described herein are methods for editing or detecting a target nucleic acid. In some embodiments, the target nucleic acid comprises a portion or a specific region of a nucleic acid from a genomic locus, any DNA amplicon of, a reverse transcribed mRNA, or a cDNA from one or more genes selected from AAVS1, ABCA4, ABCB11, ABCC8, ABCD1, ACAD9, ACADM, ACADVL, ACAT1, ACOX1, ACSF3, ADA, ADAMTS2, ADGRG1, AGA, AGL, AGPS, AGXT, AHI1, AIRE, ALDH3A2, ALDOB, ALG6, ALK, ALKBH5, ALMS1, ALPL, AMRC9, AMT, ANGPTL3, APC, Apo(a), APOCIII, APOEε4, APOL1, APP, AQP2, AR, ARFRP1, ARG1, ARL13B, ARL6, ARSA, ARSB, ASL, ASNS, ASPA, ASS1, ATM, ATP6V1B1, ATP7A, ATP7B, ATRX, ATXN1, ATXN10, ATXN2, ATXN3, ATXN7, ATXN8OS, AXIN1, AXIN2, B2M, BACE-1, BAK1, BAP1, BARD1, BAX2, BBS1, BBS10, BBS12, BBS2, BCKDHA, BCKDHB, BCL2L2, BCS1L, BEST1, Betaglobin gene, BLM, BMPR1A, BRAFV600E, BRCA1, BRCA2, BRIP1, BSND, C282Y, C9orf72, CA4, CACNA1A, CAPN3, CASR, CBS, CC2D2A, CCR5, CDC73, CDH1, CDH23, CDK11, CDK4, CDKN1B, CDKN1C, CDKN2A, CEBPA, CEP290, CERKL, CFTR, CHCHD10, CHEK2, CHM, CHRNE, CIITA, CLN3, CLN5, CLN6, CLN8, CLRN1, CLTA, CNBP, CNGB1, CNGB3, COL1A1, COL1A2, COL27A1, COL4A3, COL4A4, COL4A5, COL7A1, CPS1, CPT1A, CPT2, CRB1, CRX, CTNNA1, CTNNB1, CTNND2, CTNS, CTSK, CYBA, CYBB, CYP11B1, CYP11B2, CYP17A1, CYP19A1, CYP27A1, DBT, DCLRE1C, DERL2, DFNA36, DFNB31, DGAT2, DHCR7, DHDDS, DICER1, DIS3L2, DLD, DMD, DMPK, DNAH5, DNAI1, DNAI2, DNM2, DNMT1, DYSF, EDA, EDN3, EDNRB, EGFR, EIF2B5, EMC2, EMC3, EMD, EMX1, EPCAM, ERCC6, ERCC8, ESCO2, ETFA, ETFDH, ETHE1, EVC, EVC2, EYS, F5, F9, FactorB, FactorXI, FAH, FAM161A, FANCA, FANCB, FANCC, FANCD1, FANCD2, FANCE, FANCF, FANCG, FANCI, FANCJ, FANCL, FANCM, FANCN, FANCP, FANCS, FBN1, FGF14, FGFR2, FGFR3, FH, FHL1, FKRP, FKTN, FLCN, FMR1, FOXP3, FSCN2, FUS, FUT8, FVIII, FXII, FXN, G6PC, GAA, GALC, GALK1, GALT, GAMT, GATA2, GBA, GBE1, GCDH, GCGR, GDNF, GFAP, GFM1, GHR, GJB1, GJB2, GLA, GLB1, GLDC, GLE1, GNE, GNPTAB, GNPTG, GNS, GPC3, GPR98, GREM1, GRHPR, GRIN2B, H2AX, HADHA, HAX1, HBA1, HBA2, HBB, HEXA, HEXB, HGSNAT, HLCS, HMGCL, HOGA1, HOXB13, HPRPF3, HPRT1, HPS1, HPS3, HRAS, HSD17B4, HSD3B2, HTT, HYAL1, HYLS1, IDS, IDUA, IFITM5, IKBKAP, IL2RG, IMPDH1, INPP5E, IRF4, ITPR1, IVD, JAG1, KCNC3, KCND3, KCNJ11, KLHL7, KRAS, LAMA2, LAMA3, LAMB3, LAMC2, LCA5, LDLR, LDLRAP1, LHX3, LIFR, LIPA, LMNA, LOXHD1, LPL, LRAT, LRP6, LRPPRC, LRRK2, MAN2B1, MAPT, MAX, MCOLN1, MECP2, MED17, MEFV, MEN1, MERTK, MESP2, MET, METex14, MFN2, MFSD8, MITF, MKS1, MLC1, MLH1, MLH3, MMAA, MMAB, MMACHC, MMADHC, MMD, MPI, MPL, MPV17, MSH2, MSH3, MSH6, MTHFR, MTM1, MTRR, MTTP, MUT, MUTYH, MYO7A, NAGLU, NAGS, NBN, NDRG1, NDUFAF5, NDUFS6, NEB, NF1, NF2, NOTCH2, NPC1, NPC2, NPHP1, NPHS1, NPHS2, NR2E3, NTHL1, NTRK, NTRK1, OAT, OCT4, OFD1, OPA3, OTC, PAH, PALB2, PAQR8, PAX3, PC, PCCA, PCCB, PCDH15, PCSK9, PD1, PDCD1, PDE6B, PDGFRA, PDHA1, PDHB, PEX1, PEX10, PEX12, PEX13, PEX14, PEX16, PEX19, PEX2, PEX26, PEX3, PEX5, PEX6, PEX7, PFKM, PHGDH, PHOX2B, PKD1, PKD2, PKHD1, PKK, PLEKHG4, PMM2, PMP22, PMS1, PMS2, PNPLA3, POLD1, POLE, POMGNT1, POT1, POU5F1, PPM1A, PPP2R2B, PPT1, PRCD, PRKAR1A, PRKCG, PRNP, PROM1, PROP1, PRPF31, PRPF8, PRPH2, PRPS1, PSAP, PSD95, PSEN1, PSEN2, PTCH1, PTEN, PTS, PUS1, PYGM, RAB23, RAD50, RAD51C, RAD51D, RAG2, RAPSN, RARS2, RB1, RDH12, RECQL4, RET, RHO, RICTOR, RMRP, ROS1, RP1, RP2, RPE65, RPGR, RPGRIP1L, RPL32P3, RS1, RTEL1, RUNX1, SACS, SAMHD1, SCN1A, SCN2A, SDHA, SDHAF2, SDHB, SDHC, SDHD, SEL1L, SEPSECS, SERPING1, SGCA, SGCB, SGCG, SGSH, SIRT1, SLC12A3, SLC12A6, SLC17A5, SLC22A5, SLC25A13, SLC25A15, SLC26A2, SLC26A4, SLC35A3, SLC37A4, SLC39A4, SLC4A11, SLC6A8, SLC7A7, SMAD4, SMARCA4, SMARCAL1, SMARCB1, SMARCE1, SMN1, SMPD1, SNAI2, SNCA, SNRNP200, SOD1, SOX10, SPARA7, SPTBN2, STAR, STAT3, STK11, SUFU, SUMF1, SYNE1, SYNE2, SYS1, TARDBP, TAT, TBK1, TBP, TCIRG1, TCTN3, TECPR2, TERC, TERT, TFR2, TGFBR2, TGM1, TH, TLE3, TMEM127, TMEM138, TMEM216, TMEM43, TMEM67, TMPRSS6, TOP1, TOPORS, TP53, TPP1, IRAC, TRMU, TSFM, TSPAN14, TTBK2, TTC8, TTPA, TTR, TULP1, TYMP, UBE2G2, UBE2J1, UBE3A, USH1C, USH1G, USH2A, VEGF, VHL, VPS13A, VPS13B, VPS35, VPS45, VRK1, VSX2, VWF, WDR19, WNT10A, WS2B, WS2C, XPA, XPC, XPF, YAP1, ZFYVE26, and ZNF423. Further description of editing or detecting a target nucleic acid in the foregoing genes can be found in more detail in Kim et al., “Enhancement of target specificity of CRISPR-Cas12a by using a chimeric DNA- RNA guide”, Nucleic Acids Res. 2020 Sep. 4; 48(15):8601-8616; Wang et al., “Specificity profiling of CRISPR system reveals greatly enhanced off-target gene editing”, Scientific Reports volume 10, Article number: 2269 (2020); Tuladhar et al., “CRISPR-Cas9-based mutagenesis frequently provokes on-target mRNA misregulation”, Nature Communications volume 10, Article number: 4056 (2019); Dong et al., “Genome-Wide Off-Target Analysis in CRISPR-Cas9 Modified Mice and Their Offspring”, G3, Volume 9, Issue 11, 1 Nov. 2019, Pages 3645-3651; Winter et al., “Genome-wide CRISPR screen reveals novel host factors required for Staphylococcus aureus α-hemolysin-mediated toxicity”, Scientific Reports volume 6, Article number: 24242 (2016); and Ma et al., “A CRISPR-Based Screen Identifies Genes Essential for West-Nile-Virus-Induced Cell Death”, Cell Rep. 2015 Jul. 28; 12(4):673-83, which are hereby incorporated by reference in their entirety.

### Donor Nucleic Acids

[0880] In some embodiments, a donor nucleic acid comprises a nucleic acid that is incorporated into a target nucleic acid or target sequence. In reference to a viral vector, a donor nucleic acid comprises a sequence of nucleotides that will be or has been introduced into a cell following transfection of the viral vector. The donor nucleic acid may be introduced into the cell by any mechanism of the transfecting viral vector, including, but not limited to, integration into the genome of the cell or introduction of an episomal plasmid or viral genome. As another example, when used in reference to the activity of an effector protein, a donor nucleic acid comprises a sequence of nucleotides that will be or has been inserted at the site of cleavage by the effector protein (cleaving (hydrolysis of a phosphodiester bond) of a nucleic acid resulting in a nick or double strand break-nuclease activity). As yet another example, when used in reference to homologous recombination, a donor nucleic acid comprises a sequence of DNA that serves as a template in the process of homologous recombination, which may carry the modification that is to be or has been introduced into the target nucleic acid. By using this donor nucleic acid as a template, the genetic information, including the modification, is copied into the target nucleic acid by way of homologous recombination. In some embodiments, a donor nucleotide, comprises a single nucleotide that is incorporated into a target nucleic acid. A nucleotide is typically inserted at a site of cleavage by an effector protein.

[0881] Donor nucleic acids of any suitable size may be integrated into a target nucleic acid or genome. In some instances, the donor polynucleotide integrated into a genome is less than 3, about 3, 3.5, 4, 4.5, 5, 5.5, 6, 6.5, 7, 7.5, 8, 8.5, 9, 9.5, 10, 10.5, 11, 11.5, 12, 12.5, 13, 13.5, 14, 14.5, 15, 16, 17, 18, 19, 20, 25, 30, 35, 40, 45, 50, 100, 150, 200, 250, 300, 350, 400, 450, 500 kilobases in length. In some instances, donor nucleic acids are more than 500 kilobases (kb) in length.

[0882] The donor nucleic acid may comprise a sequence that is derived from a plant, bacteria, virus or an animal. The animal may be human. The animal may be a non-human animal, such as, by way of non-limiting example, a mouse, rat, hamster, rabbit, pig, bovine, deer, sheep, goat, chicken, cat, dog, ferret, a bird, non-human primate (e.g., marmoset, rhesus monkey). The non-human animal may be a domesticated mammal or an agricultural mammal.

### Genetically Modified Cells and Organisms

[0883] Methods of editing described herein may be employed to generate a genetically modified cell. The cell may be a eukaryotic cell (e.g., a mammalian cell) or a prokaryotic cell (e.g., an archaeal cell). The cell may be derived from a multicellular organism and cultured as a unicellular entity. The cell may comprise a heritable genetic modification, such that progeny cells derived therefrom comprise the heritable genetic mutation. The cell may be progeny of a genetically modified cell comprising a genetic modification of the genetically modified parent cell. A genetically modified cell may comprise a deletion, insertion, mutation, or non-native sequence relative to a wild-type version of the cell or the organism from which the cell was derived.

[0884] Methods may comprise contacting a cell with a nucleic acid (e.g., a plasmid or mRNA) comprising a nucleobase sequence encoding an effector protein, e.g., a D2S effector protein, wherein the effector protein comprises an amino acid sequence that is at least 70%, at least 75%, at least 80%, at least 85%, at least 90%, at least 95%, at least 97%, at least 98%, or at least 99% identical to any one of SEQ ID NOs: 1-45, 202-293, or 728-731.

[0885] Methods may comprise contacting cells with a nucleic acid (e.g., a plasmid or mRNA) comprising a nucleobase sequence encoding a guide nucleic acid, a tracrRNA, a crRNA, or any combination thereof. In some instances, the nucleobase sequence of the guide nucleic acid is at least 70%, at least 75%, at least 80%, at least 85%, at least 90%, at least 92%, at least 95%, at least 97%, at least 98%, at least 99%, or 100% identical to any one of SEQ ID NOs: 149-153. In some instances, the guide nucleic acid comprises a crRNA sequence that is at least 70%, at least 75%, at least 80%, at least 85%, at least 90%, at least 92%, at least 95%, at least 97%, at least 98%, at least 99%, or 100% identical to any one of SEQ ID NOs: 46-90. In some instances, the guide nucleic acid comprises a tracrRNA sequence that is at least 70%, at least 75%, at least 80%, at least 85%, at least 90%, at least 92%, at least 95%, at least 97%, at least 98%, at least 99%, or 100% identical to any one of SEQ ID NOs: 91-148. Contacting may comprise electroporation, acoustic poration, optoporation, viral vector-based delivery, iTOP, nanoparticle delivery (e.g., lipid or gold nanoparticle delivery), cell-penetrating peptide (CPP) delivery, DNA nanostructure delivery, or any combination thereof.

[0886] Methods may comprise contacting a cell with an effector protein, e.g., a D2S effector protein or a multimeric complex thereof, wherein the effector protein comprises an amino acid sequence that is at least 70%, at least 75%, at least 80%, at least 85%, at least 90%, at least 95%, at least 97%, at least 98%, or at least 99% identical to any one of SEQ ID NOs: 11-45, 202-293, or 728-731. Methods may comprise contacting a cell with an D2S effector effector protein, wherein the amino acid sequence of the D2S effector protein is at least 70%, at least 75%, at least 80%, at least 85%, at least 90%, at least 95%, at least 97%, at least 98%, or at least 99% identical to any one of SEQ ID NOs: 1-45, 202-293, or 728-731.

[0887] Methods may comprise cell line engineering (e.g., engineering a cell from a cell line for bioproduction). Cell lines may be used to produce a desired protein. In some instances, target nucleic acids comprise a genomic sequence. In some instances, the cell line is a Chinese hamster ovary cell line (CHO), human embryonic kidney cell line (HEK), cell lines derived from cancer cells, cell lines derived from lymphocytes, and the like. Non-limiting examples of cell lines includes: C8161, CCRF-CEM, MOLT, mIMCD-3, NHDF, HeLa-S3, Huh1, Huh4, Huh7, HUVEC, HASMC, HEKn, HEKa, MiaPaCell, Panc1, PC-3, TF1, CTLL-2, CIR, Rat6, CV1, RPTE, A10, T24, J82, A375, ARH-77, Calu1, SW480, SW620, SKOV3, SK-UT, CaCo2, P388D1, SEM-K2, WEHI-231, HB56, TIB55, Jurkat, J45.01, LRMB, Bcl-1, BC-3, IC21, DLD2, Raw264.7, NRK, NRK-52E, MRCS, MEF, Hep G2, HeLa B, HeLa T4, COS, COS-1, COS-6, COS-M6A, BS-C-1 monkey kidney epithelial, BALB/3T3 mouse embryo fibroblast, 3T3 Swiss, 3T3-L1, 132-d5 human fetal fibroblasts; 10.1 mouse fibroblasts, 293-T, 3T3, 721, 9L, A2780, A2780ADR, A2780cis, A172, A20, A253, A431, A-549, ALC, B16, B35, BCP-1 cells, BEAS-2B, bEnd.3, BHK-21, BR 293, BxPC3, C3H-10T1/2, C6/36, Cal-27, CHO, CHO-7, CHO-IR, CHO-K1, CHO-K2, CHO-T, CHO Dhfr −/−, COR-L23, COR-L23/CPR, COR-L23/5010, COR-L23/R23, COS-7, COV-434, CML T1, CMT, CT26, D17, DH82, DU145, DuCaP, EL4, EM2, EM3, EMT6/AR1, EMT6/AR10.0, FM3, H1299, H69, HB54, HB55, HCA2, HEK-293, HeLa, Hepa1c1c7, HL-60, HMEC, HT-29, Jurkat, JY cells, K562 cells, Ku812, KCL22, KG1, KYO1, LNCap, Ma-Mel 1-48, MC-38, MCF-7, MCF-10A, MDA-MB-231, MDA-MB-468, MDA-MB-435, MDCK II, MDCK II, MOR/0.2R, MONO-MAC 6, MTD-1A, MyEnd, NCI-H69/CPR, NCI-H69/LX10, NCI-H69/LX20, NCI-H69/LX4, NIH-3T3, NALM-1, NW-145, OPCN/OPCT cell lines, Peer, PNT-1A/PNT 2, RenCa, RIN-5F, RMA/RMAS, Saos-2 cells, Sf-9, SkBr3, T2, T-47D, T84, THP1 cell line, U373, U87, U937, VCaP, Vero cells, WM39, WT-49, X63, YAC-1, and YAR.

[0888] Non-limiting examples of cells that may be engineered or modified with compositions and methods described herein include immune cells, such as CART, T-cells, B-cells, NK cells, granulocytes, basophils, eosinophils, neutrophils, mast cells, monocytes, macrophages, dendritic cells, antigen-presenting cells (APC), helper T-cells, monocytes, cytotoxic T-cells, suppressor T-cells, or reticulocytes. In some instances, the cell is a hepatocyte. In some instances, the cell is a cardiomyocyte. In some instances, the cell is a myoblast. In some instances, the cell is a bone cell, a muscle cell, a gamete cell, a fat cell or a nerve cell. In some instances, the cell is an epithelial cell, a gland cell, a Paneth cell, a clara cell, exocrine secretory epithelial cell, a hormone-secreting cell, a pituitary cell, a thyroid gland cell, a parathyroid gland cell, a adrenal gland cell, a kidney cell, a liver cell, a pancreatic cell, an alpha cell, a beta cell, a delta cell, a PP cell, or an epsilon cell. In some instances, the cell is a keratinizing epithelial cell. In some instances, the cell is a neuron, a sensory neuron, a motor neuron, an interneuron, a brain neuron. In some instances, the cell is a photoreceptor cell. In some instances, the cell is a nurse cell, an interstitial cell, a barrier cell, an oral cell. In some instances, the cell is a enteroendocrine cell. In some instances, the cell is a Paneth cell, or an exocrine secretory epithelial cell. In some instances, the cell is a keratinocyte a basal cell, a melanocyte, a trichocyte, a intercalated duct cell, a striated duct cell, a duct cell, or an ameloblast. In some cases, the cell is a urinary system cell. In some instances, the cell is an adipocyte, a white fat cell, a brown fat cell, or both. In some instances, the cell is an extracellular matrix cell. In some instances, a cell is a fibroblast, a chondrocyte, an osteoblast, or an osteocyte. In some instances, the cell is a contractile cell, a skeletal muscle cell, a heart muscle cell, or a smooth muscle cell. In some instances, the cell is a sperm cell or an egg cell.

[0889] Non-limiting examples of cells that may be engineered or modified with compositions and methods described herein include include plant cells, such as parenchyma, sclerenchyma, collenchyma, xylem, phloem, germline (e.g., pollen). Cells from lycophytes, ferns, gymnosperms, angiosperms, bryophytes, charophytes, chloropytes, rhodophytes, or glaucophytes. Non-limiting examples of cells that may be engineered or modified with compositions and methods described herein include stem cells, such as human stem cells, animal stem cells, stem cells that are not derived from human embryonic stem cells, embryonic stem cells, mesenchymal stem cells, pluripotent stem cells, induced pluripotent stem cells (iPS), somatic stem cells, adult stem cells, hematopoietic stem cells, tissue-specific stem cells.

[0890] Methods of the disclosure may be performed in a subject. Compositions of the disclosure may be administered to a subject. A subject may be a human. A subject may be a mammal (e.g., rat, mouse, cow, dog, pig, sheep, horse). A subject may be a vertebrate or an invertebrate. A subject may be a laboratory animal. A subject may be a patient. A subject may be suffering from a disease. A subject may display symptoms of a disease. A subject may not display symptoms of a disease, but still have a disease. A subject may be under medical care of a caregiver (e.g., the subject is hospitalized and is treated by a physician). Methods of the disclosure may be performed in a plant, bacteria, or a fungus.

[0891] Methods of the disclosure may be performed in a cell. A cell may be in vitro. A cell may be in vivo. A cell may be ex vivo. A cell may be an isolated cell. A cell may be a cell inside of an organism. A cell may be an organism. A cell may be a cell in a cell culture. A cell may be one of a collection of cells. A cell may be a mammalian cell or derived from a mammalian cell. A cell may be a rodent cell or derived from a rodent cell. A cell may be a human cell or derived from a human cell. A cell may be a prokaryotic cell or derived from a prokaryotic cell. A cell may be a bacterial cell or may be derived from a bacterial cell. A cell may be an archaeal cell or derived from an archaeal cell. A cell may be a eukaryotic cell or derived from a eukaryotic cell. A cell may be a pluripotent stem cell. A cell may be an induced pluripotent stem cell (iPSC). A cell may be a plant cell or derived from a plant cell. A cell may be an animal cell or derived from an animal cell. A cell may be an invertebrate cell or derived from an invertebrate cell. A cell may be a vertebrate cell or derived from a vertebrate cell. A cell may be a microbe cell or derived from a microbe cell. A cell may be a fungi cell or derived from a fungi cell. A cell may be from a specific organ or tissue. A cell may be a T cell. A cell may be a natural killer T cell (NKT). A cell may be a population of cells. In some cases, a cell can be contacted with a DNA donor template.

[0892] Methods of the disclosure may be performed in a eukaryotic cell or cell line. In some instances, the eukaryotic cell is a Chinese hamster ovary (CHO) cell. In some instances, the eukaryotic cell is a Human embryonic kidney 293 cells (also referred to as HEK or HEK 293) cell. Non-limiting examples of cell lines that may be used with compositions, systems and methods of the present disclosure include C8161, CCRF-CEM, MOLT, mIMCD-3, NHDF, HeLa-S3, Huh1, Huh4, Huh7, HUVEC, HASMC, HEKn, HEKa, MiaPaCell, Panc1, PC-3, TF1, CTLL-2, CIR, Rat6, CV1, RPTE, A10, T24, J82, A375, ARH-77, Calu1, SW480, SW620, SKOV3, SK-UT, CaCo2, P388D1, SEM-K2, WEHI-231, HB56, TIB55, Jurkat, J45.01, LRMB, Bcl-1, BC-3, IC21, DLD2, Raw264.7, NRK, NRK-52E, MRCS, MEF, Hep G2, HeLa B, HeLa T4, COS, COS-1, COS-6, COS-M6A, BS-C-1 monkey kidney epithelial, BALB/3T3 mouse embryo fibroblast, 3T3 Swiss, 3T3-L1, 132-d5 human fetal fibroblasts; 10.1 mouse fibroblasts, 293-T, 3T3, 721, 9L, A2780, A2780ADR, A2780cis, A172, A20, A253, A431, A-549, ALC, B16, B35, BCP-1 cells, BEAS-2B, bEnd.3, BHK-21, BR 293, BxPC3, C3H-10T1/2, C6/36, Cal-27, CHO, CHO-7, CHO-IR, CHO-K1, CHO-K2, CHO-T, CHO Dhfr −/−, COR-L23, COR-L23/CPR, COR-L23/5010, COR-L23/R23, COS-7, COV-434, CML T1, CMT, CT26, D17, DH82, DU145, DuCaP, EL4, EM2, EM3, EMT6/AR1, EMT6/AR10.0, FM3, H1299, H69, HB54, HB55, HCA2, HEK-293, HeLa, Hepa1c1c7, HL-60, HMEC, HT-29, Jurkat, JY cells, K562 cells, Ku812, KCL22, KG1, KYO1, LNCap, Ma-Mel 1-48, MC-38, MCF-7, MCF-10A, MDA-MB-231, MDA-MB-468, MDA-MB-435, MDCK II, MDCK II, MOR/0.2R, MONO-MAC 6, MTD-1A, MyEnd, NCI-H69/CPR, NCI-H69/LX10, NCI-H69/LX20, NCI-H69/LX4, NIH-3T3, NALM-1, NW-145, OPCN/OPCT cell lines, Peer, PNT-1A/PNT 2, RenCa, RIN-5F, RMA/RMAS, Saos-2 cells, Sf-9, SkBr3, T2, T-47D, T84, THP1 cell line, U373, U87, U937, VCaP, Vero cells, WM39, WT-49, X63, YAC-1, and YAR. Non-limiting examples of other cells that may be used with the disclosure include immune cells, such as CART, T-cells, B-cells, NK cells, granulocytes, basophils, eosinophils, neutrophils, mast cells, monocytes, macrophages, dendritic cells, antigen-presenting cells (APC), or adaptive cells. Non-limiting examples of cells that may be used with this disclosure also include plant cells, such as Parenchyma, sclerenchyma, collenchyma, xylem, phloem, germline (e.g., pollen). Cells from lycophytes, ferns, gymnosperms, angiosperms, bryophytes, charophytes, chloropytes, rhodophytes, or glaucophytes. Non-limiting examples of cells that may be used with this disclosure also include stem cells, such as human stem cells, animal stem cells, stem cells that are not derived from human embryonic stem cells, embryonic stem cells, mesenchymal stem cells, pluripotent stem cells, induced pluripotent stem cells (iPS), somatic stem cells, adult stem cells, hematopoietic stem cells, tissue-specific stem cells.

### Agricultural Engineering

[0893] Compositions and methods of the disclosure may be used for agricultural engineering. For example, compositions and methods of the disclosure may be used to confer desired traits on a plant. A plant may be engineered for the desired physiological and agronomic characteristic using the present disclosure. In some instances, the target nucleic acid sequence comprises a nucleic acid sequence of a plant. In some instances, the target nucleic acid sequence comprises a genomic nucleic acid sequence of a plant cell. In some instances, the target nucleic acid sequence comprises a nucleic acid sequence of an organelle of a plant cell. In some instances, the target nucleic acid sequence comprises a nucleic acid sequence of a chloroplast of a plant cell.

[0894] The plant may be a dicotyledonous plant. Non-limiting examples of orders of dicotyledonous plants include Magniolales, Illiciales, Laurales, Piperales, Aristochiales, Nymphaeales, Ranunculales, Papeverales, Sarraceniaceae, Trochodendrales, Hamamelidales, Eucomiales, Leitneriales, Myricales, Fagales, Casuarinales, Caryophyllales, Batales, Polygonales, Plumbaginales, Dilleniales, Theales, Malvales, Urticales, Lecythidales, Violales, Salicales, Capparales, Ericales, Diapensales, Ebenales, Primulales, Rosales, Fabales, Podostemales, Haloragales, Myrtales, Cornales, Proteales, San tales, Rafflesiales, Celastrales, Euphorbiales, Rhamnales, Sapindales, Juglandales, Geraniales, Polygalales, Umbellales, Gentianales, Polemoniales, Lamiales, Plantaginales, Scrophulariales, Campanulales, Rubiales, Dipsacales, and Asterales.

[0895] The plant may be a monocotyledonous plant. Non-limiting examples of orders of monocotyledonous plants include Alismatales, Hydrocharitales, Najadales, Triuridales, Commelinales, Eriocaulales, Restionales, Poales, Juncales, Cyperales, Typhales, Bromeliales, Zingiberales, Arecales, Cyclanthales, Pandanales, Arales, Lilliales, and Orchid ales. A plant may belong to the order, for example, Gymnospermae, Pinales, Ginkgoales, Cycadales, Araucariales, Cupressales and Gnetales.

[0896] Non-limiting examples of plants include plant crops, fruits, vegetables, grains, soy bean, corn, maize, wheat, seeds, tomatoes, rice, cassava, sugarcane, pumpkin, hay, potatoes, cotton, cannabis, tobacco, flowering plants, conifers, gymnosperms, ferns, clubmosses, hornworts, liverworts, mosses, wheat, maize, rice, millet, barley, tomato, apple, pear, strawberry, orange, acacia, carrot, potato, sugar beets, yam, lettuce, spinach, sunflower, rape seed, Arabidopsis, alfalfa, amaranth, apple, apricot, artichoke, ash tree, asparagus, avocado, banana, barley, beans, beet, birch, beech, blackberry, blueberry, broccoli, Brussel's sprouts, cabbage, canola, cantaloupe, carrot, cassava, cauliflower, cedar, a cereal, celery, chestnut, cherry, Chinese cabbage, citrus, clementine, clover, coffee, corn, cotton, cowpea, cucumber, cypress, eggplant, elm, endive, eucalyptus, fennel, figs, fir, geranium, grape, grapefruit, groundnuts, ground cherry, gum hemlock, hickory, kale, kiwifruit, kohlrabi, larch, lettuce, leek, lemon, lime, locust, pine, maidenhair, maize, mango, maple, melon, millet, mushroom, mustard, nuts, oak, oats, oil palm, okra, onion, orange, an ornamental plant or flower or tree, papaya, palm, parsley, parsnip, pea, peach, peanut, pear, peat, pepper, persimmon, pigeon pea, pine, pineapple, plantain, plum, pomegranate, potato, pumpkin, radicchio, radish, rapeseed, raspberry, rice, rye, sorghum, safflower, sallow, soybean, spinach, spruce, squash, strawberry, sugar beet, sugarcane, sunflower, sweet potato, sweet corn, tangerine, tea, tobacco, tomato, trees, triticale, turf grasses, turnips, vine, walnut, watercress, watermelon, wheat, yams, yew, and zucchini. A plant may include algae.

### XIV. Methods of Treatment

[0897] Described herein are methods for treating a disease in a subject by modifying a target nucleic acid associated with a gene or expression of a gene related to the disease. In some embodiments, methods comprise administering a composition or cell described herein to a subject. By way of non-limiting example, the disease may be a cancer, an ophthalmological disorder, a neurological disorder, a neurodegenerative disease, a blood disorder, or a metabolic disorder, or a combination thereof. The disease may be an inherited disorder, also referred to as a genetic disorder. The disease may be the result of an infection or associated with an infection. In some embodiments, the disease comprises at least one of: a cancer, an inherited disorder, an ophthalmological disorder, neurological disorder, a blood disorder, a metabolic disorder, a genetic disorder, an infection, or any combination thereof. In some embodiments, the disease or disorder comprises one or more of: achondroplasia, Acromegaly, Alagille Syndrome, Alexander Disease, Alzheimer's disease, amebic dysentery, Amyotrophic lateral sclerosis (ALS), Angelman Syndrome, angioedema, antiphospholipid syndrome, babesiosis, balantidial dysentery, brain or spinal injury, cancer, cardiovascular disease and/or lipodystrophies, centronuclear myopathy, Chagas' disease, Charcot Marie Tooth Disease, CNS trauma, coccidiosis, Cri du chat syndrome, Crouzon syndrome, cystic fibrosis, Dercum disease, diabetes, Dravet Syndrome, Emery-Dreifuss syndrome, encephalitis, epilepsy, Factor V Leiden Thrombophilia, Familial Creutzfeld-Jakob Disease, Familial Mediterranean Fever, Fanconi anemia, fragile X syndrome, Friedreich's ataxia, Gaucher disease, GM2-Gangliosidoses (e.g. Tay Sachs Disease, Sandhoff disease), hearing loss disorders, hemochromatosis, hemophilia, homozygous familial hypercholesterolemia, Huntington's disease, Joubert syndrome, Leber Congenital Amaurosis Type 10, Li-Fraumeni syndrome, Lynch syndrome, Marfan syndrome, MECP2 Duplication syndrome and Rett syndrome, meningitis, methylmalonic acidemia, migraines, myotonic dystrophy, NAFLD/NASH, neurofibromatosis, non-small cell lung cancer, osteogenesis imperfecta, Parkinson's disease, Peutz-Jeghers syndrome, polycystic kidney disease, retinitis pigmentosa, sickle cell anemia, spinocerebellar ataxia, stroke and other hemorrhages, thalassemia, Usher Syndrome, von Hippel-Lindau disease, von Willebrand disease, Waardenburg syndrome, Zellweger syndrome, or any combination thereof.

[0898] The compositions and methods described herein may be used to treat, prevent, or inhibit a disease or syndrome in a subject. In some embodiments, a syndrome is a group of symptoms which, taken together, characterize a condition. In some embodiments, the disease is a liver disease, a lung disease, an eye disease, or a muscle disease. Exemplary diseases and syndromes include, but are not limited to: 11-hydroxylase deficiency; 17,20-desmolase deficiency; 17-hydroxylase deficiency; 3-hydroxyisobutyrate aciduria; 3-hydroxysteroid dehydrogenase deficiency; 46,XY gonadal dysgenesis; AAA syndrome; ABCA3 deficiency; ABCC8-associated hyperinsulinism; aceruloplasminemia; acromegaly; achondrogenesis type 2; acral peeling skin syndrome; acrodermatitis enteropathica; adrenocortical micronodular hyperplasia; adrenoleukodystrophies; adrenomyeloneuropathies; Aicardi-Goutieres syndrome; Alagille disease (also called Alagille Syndrome); Alexander Disease, Alpers syndrome; alpha-1 antitrypsin deficiency (AATD); alpha-mannosidosis; Alstrom syndrome; Alzheimer's disease; amebic dysentery; amelogenesis imperfecta; amish type microcephaly; amyotrophic lateral sclerosis (ALS); anaplastic large cell lymphoma; anauxetic dysplasia; androgen insensitivity syndrome; angiopathic thrombosis; antiphospholipid syndrome; Antley-Bixler syndrome; APECED, Apert syndrome, aplasia of lacrimal and salivary glands, argininemia, arrhythmogenic right ventricular dysplasia, Arts syndrome, ARVD2, arylsulfatase deficiency type metachromatic leokodystrophy, ataxia telangiectasia, autoimmune lymphoproliferative syndrome; autoimmune polyglandular syndrome type 1; autosomal dominant anhidrotic ectodermal dysplasia; autosomal dominant deafness; autosomal dominant polycystic kidney disease; autosomal recessive microtia; autosomal recessive renal glucosuria; autosomal visceral heterotaxy; babesiosis; balantidial dysentery; Bardet-Biedl syndrome; Bartter syndrome; basal cell nevus syndrome; Batten disease; benign recurrent intrahepatic cholestasis; beta-mannosidosis; β-thalassemia; Bethlem myopathy; Blackfan-Diamond anemia; bleeding disorder (coagulation); blepharophimosis; Byler disease; C syndrome; CADASIL; calcific aortic stenosis; calcification of joints and arteries; carbamyl phosphate synthetase deficiency; cardiofaciocutaneous syndrome; Carney triad; carnitine palmitoyltransferase deficiencies; cartilage-hair hypoplasia; cblC type of combined methylmalonic aciduria; CD18 deficiency; CD3Z-associated primary T-cell immunodeficiency; CD40L deficiency; CDAGS syndrome; CDG1A; CDG1B; CDG1M; CDG2C; CEDNIK syndrome; central core disease; centronuclear myopathy; cerebral capillary malformation; cerebrooculofacioskeletal syndrome type 4; cerebrooculogacioskeletal syndrome; cerebrotendinous xanthomatosis; Chaga's Disease; Charcot Marie Tooth Disesase; cherubism; CHILD syndrome; chronic granulomatous disease; chronic recurrent multifocal osteomyelitis; citrin deficiency; classic hemochromatosis; CNPPB syndrome; cobalamin C disease; Cockayne syndrome; coenzyme Q10 deficiency; Coffin-Lowry syndrome; Cohen syndrome; combined deficiency of coagulation factors V; common variable immune deficiency 3; complement hyperactivation; complete androgen insentivity; cone rod dystrophies; conformational diseases; congenital bile adid synthesis defect type 1; congenital bile adid synthesis defect type 2; congenital defect in bile acid synthesis type; congenital erythropoietic porphyria; congenital generalized osteosclerosis; Cornelia de Lange syndrome; coronary heart disease; Cousin syndrome; Cowden disease; COX deficiency; Cri du chat syndrome; Crigler-Najjar disease; Crigler-Najjar syndrome type 1; Crisponi syndrome; Crouzon syndrome; Currarino syndrome; Curth-Macklin type ichthyosis hystrix; cutis laxa; cystic fibrosis; cystinosis; d-2-hydroxyglutaric aciduria; DDP syndrome; Dejerine-Sottas disease; Denys-Drash syndrome; Dercum disease; desmin cardiomyopathy; desmin myopathy; DGUOK-associated mitochondrial DNA depletion; diabetes Type I; diabetes Type II; disorders of glutamate metabolism; distal spinal muscular atrophy type 5; DNA repair diseases; dominant optic atrophy; Doyne honeycomb retinal dystrophy; Dravet Syndrome; Duchenne muscular dystrophy; dyskeratosis congenita; Ehlers-Danlos syndrome type 4; Ehlers-Danlos syndromes; Elejalde disease; Ellis-van Creveld disease; Emery-Dreifuss muscular dystrophies; encephalomyopathic mtDNA depletion syndrome; encephalitis; enzymatic diseases; EPCAM-associated congenital tufting enteropathy; epidermolysis bullosa with pyloric atresia; epilepsy; facioscapulohumeral muscular dystrophy; Factor V Leiden thrombophilia; Faisalabad histiocytosis; familial atypical mycobacteriosis; familial capillary malformation-arteriovenous; Familial Creutzfeld-Jakob disease; familial esophageal achalasia; familial glomuvenous malformation; familial hemophagocytic lymphohistiocytosis; familial mediterranean fever; familial megacalyces; familial schwannomatosis; familial spina bifida; familial splenic asplenia/hypoplasia; familial thrombotic thrombocytopenic purpura; Fanconi disease (Fanconi anemia); Feingold syndrome; FENIB; fibrodysplasia ossificans progressiva; FKTN; Fragile X syndrome; Francois-Neetens fleck corneal dystrophy; Frasier syndrome; Friedreich's ataxia; FTDP-17; Fuchs corneal dystrophy; fucosidosis; G6PD deficiency; galactosialidosis; Galloway syndrome; Gardner syndrome; Gaucher disease; Gitelman syndrome; GLUT1 deficiency; GM2- Gangliosidoses (e.g., Tay Sachs Disease, Sandhoff Disease) glycogen storage disease type 1b; glycogen storage disease type 2; glycogen storage disease type 3; glycogen storage disease type 4; glycogen storage disease type 9a; glycogen storage diseases; GM1-gangliosidosis; Greenberg syndrome; Greig cephalopolysyndactyly syndrome; hair genetic diseases; hairy cell leukemia; HANAC syndrome; harlequin type ichtyosis congenita; HDR syndrome; hearing loss; hemochromatosis type 3; hemochromatosis type 4; hemolytic anemia; hemolytic uremic syndrome; hemophilia A; hemophilia B; hereditary angioedema type 3; hereditary angioedemas; hereditary hemorrhagic telangiectasia; hereditary hypofibrinogenemia; hereditary intraosseous vascular malformation; hereditary leiomyomatosis and renal cell cancer; hereditary neuralgic amyotrophy; hereditary sensory and autonomic neuropathy type; Hermansky-Pudlak disease; HHH syndrome; HHT2; hidrotic ectodermal dysplasia type 1; hidrotic ectodermal dysplasias; histiocytic sarcoma; HNF4A-associated hyperinsulinism; HNPCC; homozygous familial hypercholesterolemia; human immunodeficiency with microcephaly; human papilloma virus (HPV) infection; Huntington's disease; hyper-IgD syndrome; hyperinsulinism-hyperammonemia syndrome; hypercholesterolemia; hypertrophy of the retinal pigment epithelium; hypochondrogenesis; hypohidrotic ectodermal dysplasia; ICF syndrome; idiopathic congenital intestinal pseudo-obstruction; immunodeficiency 13; immunodeficiency 17; immunodeficiency 25; immunodeficiency with hyper-IgM type 1; immunodeficiency with hyper-IgM type 3; immunodeficiency with hyper-IgM type 4; immunodeficiency with hyper-IgM type 5; immunoglobulin alpha deficiency; inborn errors of thyroid metabolism; infantile myofibromatosis; infantile visceral myopathy; infantile X-linked spinal muscular atrophy; intrahepatic cholestasis of pregnancy; IPEX syndrome; IRAK4 deficiency; isolated congenital asplenia; Jeune syndrome; Johanson-Blizzard syndrome; Joubert syndrome; JP-HHT syndrome; juvenile hemochromatosis; juvenile hyalin fibromatosis; juvenile nephronophthisis; Kabuki mask syndrome; Kallmann syndromes; Kartagener syndrome; KCNJ11-associated hyperinsulinism; Kearns-Sayre syndrome; Kostmann disease; Kozlowski type of spondylometaphyseal dysplasia; Krabbe disease; LADD syndrome; late infantile-onset neuronal ceroid lipofuscinosis; LCK deficiency; LDHCP syndrome; Leber Congenital Amaurosis Teyp 10; Legius syndrome; Leigh syndrome; lethal congenital contracture syndrome 2; lethal congenital contracture syndromes; lethal contractural syndrome type 3; lethal neonatal CPT deficiency type 2; lethal osteosclerotic bone dysplasia; leukocyte adhesion deficiency; Li Fraumeni syndrome; LIG4 syndrome; lipodystrophy; lissencephaly type 1; lissencephaly type 3; Loeys-Dietz syndrome; low phospholipid-associated cholelithiasis; Lynch Syndrome; lysinuric protein intolerance; a lysosomal storage disease (e.g., Hunter syndrome, Hurler syndrome); macular dystrophy; Maffucci syndrome; Majeed syndrome; mannose-binding protein deficiency; mantle cell lymphoma; Marfan disease; Marshall syndrome; MASA syndrome; mastocytosis; MCAD deficiency; McCune-Albright syndrome; MCKD2; Meckel syndrome; MECP2 Duplication Syndrome; Meesmann corneal dystrophy; megacystis-microcolon-intestinal hypoperistalsis; megaloblastic anemia type 1; MEHMO; MELAS; Melnick-Needles syndrome; MEN2s; meningitis; Menkes disease; metachromatic leukodystrophies; methymalonic acidemia due to transcobalamin receptor defect; methylmalonic acidurias; methylvalonic aciduria; microcoria-congenital nephrosis syndrome; microvillous atrophy; migraine; mitochondrial neurogastrointestinal encephalomyopathy; monilethrix; monosomy X; mosaic trisomy 9 syndrome; Mowat-Wilson syndrome; mucolipidosis type 2; mucolipidosis type Ma; mucolipidosis type IV; mucopolysaccharidoses; mucopolysaccharidosis type 3A; mucopolysaccharidosis type 3C; mucopolysaccharidosis type 4B; multiminicore disease; multiple acyl-CoA dehydrogenation deficiency; multiple cutaneous and mucosal venous malformations; multiple endocrine neoplasia type 1; multiple sulfatase deficiency; mycosis fungoides; myotonic dystrophy; NAIC; nail-patella syndrome; nemaline myopathies; neonatal diabetes mellitus; neonatal surfactant deficiency; nephronophtisis; Netherton disease; neurofibromatoses; neurofibromatosis type 1; Niemann-Pick disease type A; Niemann-Pick disease type B; Niemann-Pick disease type C; NKX2E; non-alcoholic fatty liver disease (NAFLD); non-alcoholic steatohepatitis (NASH); Noonan syndrome; North American Indian childhood cirrhosis; NROB1 duplication-associated DSD; ocular genetic diseases; oculo-auricular syndrome; OLEDAID; oligomeganephronia; oligomeganephronic renal hypolasia; Ollier disease; Opitz-Kaveggia syndrome; orofaciodigital syndrome type 1; orofaciodigital syndrome type 2; osseous Paget disease; osteogenesis imperfecta; otopalatodigital syndrome type 2; OXPHOS diseases; palmoplantar hyperkeratosis; panlobar nephroblastomatosis; Parkes-Weber syndrome; Parkinson's disease; partial deletion of 21q22.2-q22.3; Pearson syndrome; Pelizaeus-Merzbacher disease; Pendred syndrome; pentalogy of Cantrell; peroxisomal acyl-CoA-oxidase deficiency; Peutz-Jeghers syndrome; Pfeiffer syndrome; Pierson syndrome; pigmented nodular adrenocortical disease; pipecolic acidemia; Pitt-Hopkins syndrome; plasmalogens deficiency; platelet glycoprotein IV deficiency; pleuropulmonary blastoma and cystic nephroma; polycystic kidney disease; polycystic ovarian disease; polycystic lipomembranous osteodysplasia; Pompe disease, including infantile onset Pompe disease (IOPD) and late onset Pompe disease (LOPD); porphyrias; PRKAG2 cardiac syndrome, premature ovarian failure; primary erythermalgia; primary hemochromatoses; primary hyperoxaluria; progressive familial intrahepatic cholestasis; propionic acidemia; protein-losing enteropathy; pyruvate decarboxylase deficiency; RAPADILINO syndrome; renal cystinosis; retinitis pigmentosa; Rett Syndrome; rhabdoid tumor predisposition syndrome; Rieger syndrome; ring chromosome 4; Roberts syndrome; Robinow-Sorauf syndrome; Rothmund-Thomson syndrome; severe combined immunodeficiency disorder (SCID); Saethre-Chotzen syndrome; Sandhoff disease; SC phocomelia syndrome; SCAS; Schinzel phocomelia syndrome; short rib-polydactyly syndrome type 1; short rib-polydactyly syndrome type 4; short-rib polydactyly syndrome type 2; short-rib polydactyly syndrome type 3; Shwachman disease; Shwachman-Diamond disease; sickle cell anemia; Silver-Russell syndrome; Simpson-Golabi-Behmel syndrome; Smith-Lemli-Opitz syndrome; SPG7-associated hereditary spastic paraplegia; spherocytosis; spinocerebellar ataxia; split-hand/foot malformation with long bone deficiencies; spondylocostal dysostosis; sporadic visceral myopathy with inclusion bodies; storage diseases; Stargardt macular dystrophy; STRA6-associated syndrome; stroke; Tay-Sachs disease; thanatophoric dysplasia; thyroid metabolism diseases; Tourette syndrome; transthyretin-associated amyloidosis; trisomy 13; trisomy 22; trisomy 2p syndrome; tuberous sclerosis; tufting enteropathy; urea cycle diseases; Usher Syndrome; Van Den Ende-Gupta syndrome; Van der Woude syndrome; variegated mosaic aneuploidy syndrome; VLCAD deficiency; von Hippel-Lindau disease; von Willebrand disease; Waardenburg syndrome; WAGR syndrome; Walker-Warburg syndrome; Werner syndrome; Wilson disease; Wiskott-Aldrich Syndrome; Wolcott-Rallison syndrome; Wolfram syndrome; X-linked agammaglobulinemia; X-linked chronic idiopathic intestinal pseudo-obstruction; X-linked cleft palate with ankyloglossia; X-linked dominant chondrodysplasia punctata; X-linked ectodermal dysplasia; X-linked Emery-Dreifuss muscular dystrophy; X-linked lissencephaly; X-linked lymphoproliferative disease; X-linked visceral heterotaxy; xanthinuria type 1; xanthinuria type 2; xeroderma pigmentosum; XPV; and Zellweger disease.

[0899] Described herein are compositions and methods for editing or detecting a target nucleic acid, wherein the target nucleic acid is a gene, a portion thereof, a transcript thereof. In some embodiments, the target nucleic acid is a reverse transcript (e.g. a cDNA) of an mRNA transcribed from the gene, or an amplicon thereof. In some embodiments, the target nucleic acid is an amplicon of at least a portion of a gene. Non-limiting examples of genes are: AAVS1, ABCA4, ABCB11, ABCC8, ABCD1, ABCG5, ABCG8, ACAD9, ACADM, ACADVL, ACAT1, ACOX1, ACSF3, ADA, ADAMTS2, ADGRG1, AGA, AGL, AGPS, AGXT, AHI1, AIRE, ALDH3A2, ALDOB, ALG6, ALK, ALKBH5, ALMS1, ALPL, AMRC9, AMT, ANAPC10, ANAPC11, ANGPTL3, APC, Apo(a), APOCIII, APOEε4, APOL1, APP, AQP2, AR, ARFRP1, ARG1, ARH, ARL13B, ARL6, ARSA, ARSB, ASL, ASNS, ASPA, ASS1, ATM ATP6V1B1, ATP7A, ATP7B, ATRX, ATXN1, ATXN10, ATXN2, ATXN3, ATXN7, ATXN8OS, AXIN1, AXIN2, B2M, BACE-1, BAK1, BAP1, BARD1, BAX2, BBS1, BBS10, BBS12, BBS2, BCKDHA, BCKDHB, BCL2L2, BCS1L, BEST1, Betaglobin gene, BIM BMPR1A, BRAF, BRAFV600E, BRCA1, BRCA2, BRIP1, BSND, C9orf72, CA4, CACNA1A, CAPN3, CASR, CBS, CCNB1 CC2D2A, CCR5, CD1, CD2, CD3, CD3D, CD3Z, CD4, CD5, CD6, CD7, CD8A, CD8B, CD9, CD14, CD18, CD19, CD21, CD22, CD23, CD27, CD28, CD30, CD33, CD34, CD36, CD38, CD40, CD40L, CD44, CD46, CD47, CD48, CD52, CD55, CD57, CD58, CD59, CD68, CD69, CD72, CD73, CD74, CD79A, CD80, CD81, CD83, CD84, CD86, CD90, CD93, CD96, CD99, CD100, CD123, CD160, CD163, CD164, CD164L2, CD166, CD200, CD204, CD207, CD209, CD226, CD244, CD247, CD274, CD276, CD300, CD320, CDC73, CDH1, CDH23, CDK11, CDK4, CDK1V1A, CDK1V1B, CDK1V1C, CDKN2A, CDKN2B, CEBPA, CELA3B, CEP290, CERKL, CFB, CFTR, CHCHD10, CHEK2, CHM, CHRNE, CIITA, CLN3, CLN5, CLN6, CLN8, CLRN1, CLTA, CNBP, CNGB1, CNGB3, COL1A1, COL1A2, COL27A1, COL4A3, COL4A4, COL4A5, COL7A1, CPS1, CPT1A, CPT2, CRB1, CREBBP, CRX, CRYAA, CTNNA1, CTNNB1, CTNND2, CTNS, CTSK, CXCL12, CYBA, CYBB, CYP11B1, CYP11B2, CYP17A1, CYP19A1, CYP27A1, DBT, DCC, DCLRE1C, DERL2, DFNA36, DFNB31, DGAT2, DHCR7, DHDDS, DICER1, DIS3L2, DLD, DMD, DMPK, DNAH5, DNAI1, DNAI2, DNM2, DNMT1, DPC4, DYSF, EDA, EDN3, EDNRB, EGFR, EIF2B5, EMC2, EMC3, EMD, EMX1, EN1, EPCAM, ERCC6, ERCC8, ESCO2, ETFA, ETFDH, ETHE1, EVC, EVC2, EYS, F5, F9, FXI, FAH, FAM161A, FANCA, FANCB, FANCC, FANCD1, FANCD2, FANCE, FANCF, FANCG, FANCI, FANCJ, FANCL, FANCM, FANCN FANCP, FANCS, FBN1, FGF14, FGFR2, FGFR3, FGA, FGB, FGG, FH, FHL1, FIX, FKRP, FKTN, FLCN, FMR1, FOXP3, FSCN2, FUS, FUT8, FVIII, FXII, FXN, G6PC, GAA, GALC, GALK1, GALT, GAMT, GATA2, GATA-4, GBA, GBE1, GCDH, GCGR, GDNF, GFAP, GFM1, GHR, GJB1, GJB2, GLA, GLB1, GLDC, GLE1, GNE, GNPTAB, GNPTG, GNS, GPC3, GPR98, GREM1, GRHPR, GRIN2B, H2AFX, H2AX, HADHA, HAX1, HBA1, HBA2, HBB, HER2, HEXA, HEXB, HFE, HGSNAT, HLCS, HMGCL, HOGA1, HOXB13, HPRPF3, HPRT1, HPS1, HPS3, HRAS, HRD1, HSD17B4, HSD3B2, HTT, HUS1, HYAL1, HYLS1, IDS, IDUA, IFITM5, IKBKAP, IL2RG, IL7R, INPP5E, IRF4, ITGB2, ITPR1, IVD, JAG1, JAK1, JAK3, KCNC3, KCND3, KCNJ11, KLHL7, KRAS, LAMA2, LAMAS, LAMB3, LAMC2, LCA5, LDLR, LDLRAP1, LHX3, LIFR, LIPA, LMNA, LOR, LOXHD1, LPL, LRAT, LRP6, LRPPRC, LRRK2, MADR2, MAN2B1, MAPT, MAX MCM6, MCOLN1, MECP2, MED17, MEFV, MEN1, MERTK, MESP2, MET, METex14, MFN2, MFSD8, MIA3, MITF, MKL2, MKS1, MLC1, MLH1, MLH3, MMAA, MMAB, MMACHC, MMADHC, MMD, MPI, MPL, MPV17, MSH2, MSH3, MSH6, MTHFD1L, MTHFR, MTM1, MTRR, MTTP, MUT, MUTYH, MYC, MYH7, MYO7A, NAGLU, NAGS, NBN NDRG1, NDUFAF5, NDUFS6, NEB, NF1, NF2, NKX2-5, NOG, NOTCH1, NOTCH2, NPC1, NPC2, NPHP1, NPHS1, NPHS2, NRAS, NR2E3, NTHL1, NTRK, NTRK1, OAT, OCT4, OFD1, OPA3, OTC, PAH, PALB2, PAQR8, PAX3, PC, PCCA, PCCB, PCDH15, PCSK9, PD1, PDCD1, PDE6B, PDGFRA, PDHA1, PDHB, PEX1, PEX10, PEX12, PEX13, PEX14, PEX16, PEX19, PEX2, PEX26, PEX3, PEX5, PEX6, PEX7, PFKM, PHGDH, PHOX2B, PKD1, PKD2, PKHD1, PKK, PLEKHG4, PMM2, PMP22, PMS1, PMS2, PNPLA3, POLD1, POLE, POMGNT1, POT1, POU5F1, PPM1A, PPP2R2B, PPT1, PRCD, PRKAG2, PRKAR1A, PRKCG, PRNP, PROM1, PROP1, PRPF31, PRPF8, PRPH2, PRPS1, PSAP, PSD95, PSEN1, PSEN2, PSRC1, PTCH1, PTEN PTS, PUS1, PYGM, RAB23, RAD50, RAD51C, RAD51D, RAG1, RAG2, RAPSN, RARS2, RB1, RDH12, RECQL4, RET, RHO, RICTOR, RMRP, ROS1, RP1, RP2, RPE65, RPGR, RPGRIP1L, RPL32P3, RS1, RTCA, RTEL1, RUNX1, SACS, SAMHD1, SCN1A, SCN2A, SDHA, SDHAF2, SDHB, SDHC, SDHD, SEL1L, SEPSECS, SERPINA1, SERPING1, SGCA, SGCB, SGCG, SGSH, SIRT1, SLC12A3, SLC12A6, SLC17A5, SLC22A5, SLC25A13, SLC25A15, SLC26A2, SLC26A4, SLC35A3, SLC35B4 SLC37A4, SLC39A4, SLC4A11, SLC6A8, SLC7A7, SMAD3, SMAD4, SMARCA4, SMARCAL1, SMARCB1, SMARCE1, SMN1, SMPD1, SNAI2, SNCA, SNRNP200, SOD1, SOX10, SPARA7, SPTBN2, STAR, STATS, STK11, SUFU, SUMF1, SYNE1, SYNE2, SYS1, TARDBP, TAT, TBK1, TBP, TCIRG1, TCTN3, TECPR2, TERC, TERT, TFR2, TGFBR2, TGM1, TH, TLE3, TMEM127, TMEM138, TMEM216, TMEM43, TMEM67, TMPRSS6, TOP1, TOPORS, TP53, TPP1, TRAC, TRMU, TSC1, TSC2, TSFM, TSPAN14, TTBK2, TTC8, TTPA, TTR, TULP1, TYMP, UBE2G2, UBE2J1, UBE3A, USH1C, USH1G, USH2A, VEGF, VHL, VPS13A, VPS13B, VPS35, VPS45, VRK1, VSX2, VWF, WAS, WDR19, WDR48, WNT10A, WRN, WS2B, WS2C, WT1, XPA, XPC, XPF, XRCC3, YAP1, ZAC1, ZEB1, ZFYVE26, and ZNF423.

[0900] In some embodiments, the method for treating a disease comprises modifying at least one gene associated with the disease or modifying expression of the at least one gene such that the disease is treated. In some embodiments, the disease is Alzheimer's disease and the gene is selected from APP, BACE-1, PSD95, MAPT, PSEN1, PSEN2, and APOEε4. In some embodiments, the disease is Parkinson's disease and the gene is selected from SNCA, GDNF, and LRRK2. In some embodiments, the disease comprises Centronuclear myopathy and the gene is DNM2. In some embodiments, the disease is Huntington's disease and the gene is HTT. In some embodiments, the disease is Alpha-1 antitrypsin deficiency (AATD) and the gene is SERPINA1. In some embodiments, the disease is amyotrophic lateral sclerosis (ALS) and the gene is selected from SOD1, FUS, C9ORF72, ATXN2, TARDBP, and CHCHD10. In some embodiments, the disease comprises Alexander Disease and the gene is GFAP. In some embodiments, the disease comprises anaplastic large cell lymphoma and the gene is CD30. In some embodiments, the disease comprises Angelman Syndrome and the gene is UBE3A. In some embodiments, the disease comprises calcific aortic stenosis and the gene is Apo(a). In some embodiments, the disease comprises CD3Z-associated primary T-cell immunodeficiency and the gene is CD3Z or CD247. In some embodiments, the disease comprises CD18 deficiency and the gene is ITGB2. In some embodiments, the disease comprises CD40L deficiency and the gene is CD40L. In some embodiments, the disease comprises CNS trauma and the gene is VEGF. In some embodiments, the disease comprises coronary heart disease and the gene is selected from FGA, FGB, and FGG. In some embodiments, the disease comprises MECP2 Duplication syndrome and Rett syndrome and the gene is MECP2. In some embodiments, the disease comprises a bleeding disorder (coagulation) and the gene is FXI. In some embodiments, the disease comprises fragile X syndrome and the gene is FMR1. In some embodiments, the disease comprises Fuchs corneal dystrophy and the gene is selected from ZEB1, SLC4A11, and LOXHD1. In some embodiments, the disease comprises GM2-Gangliosidoses (e.g., Tay Sachs Disease, Sandhoff disease) and the gene is selected from HEXA and HEXB. In some embodiments, the disease comprises Hearing loss disorders and the gene is DFNA36. In some embodiments, the disease is Pompe disease, including infantile onset Pompe disease (IOPD) and late onset Pompe disease (LOPD) and the gene is GAA. In some embodiments, the disease is Retinitis pigmentosa and the gene is selected from PDE6B, RHO, RP1, RP2, RPGR, PRPH2, IMPDH1, PRPF31, CRB1, PRPF8, TULP1, CA4, HPRPF3, ABCA4, EYS, CERKL, FSCN2, TOPORS, SNRNP200, PRCD, NR2E3, MERTK, USH2A, PROM1, KLHL7, CNGB1, TTC8, ARL6, DHDDS, BEST1, LRAT, SPARA7, CRX, CLRN1, RPE65, and WDR19. In some embodiments, the disease comprises Leber Congenital Amaurosis Type 10 and the gene is CEP290. In some embodiments, the disease is cardiovascular disease and/or lipodystrophies and the gene is selected from ABCG5, ABCG8, AGT, ANGPTL3, APOCIII, APOA1, APOL1, ARH, CDKN2B, CFB, CXCL12, FXI, FXII, GATA-4, MIA3, MKL2, MTHFD1L, MYH7, NKX2-5, NOTCH1, PKK, PCSK9, PSRC1, SMAD3, and TTR. In some embodiments, the disease comprises acromegaly and the gene is GHR. In some embodiments, the disease comprises acute myeloid leukemia and the gene is CD22. In some embodiments, the disease is diabetes and the gene is GCGR. In some embodiments, the disease is NAFLD/NASH and the gene is selected from DGAT2 and PNPLA3. In some embodiments, the disease is cancer and the gene is selected from STAT3, YAP1, FOXP3, AR (Prostate cancer), and IRF4 (multiple myeloma). In some embodiments, the disease is cystic fibrosis and the gene is CFTR. In some embodiments, the disease is Duchenne muscular dystrophy and the gene is DMD. In some embodiments, the disease comprises angioedema and the gene is PKK. In some embodiments, the disease comprises thalassemia and the gene is TMPRSS6. In some embodiments, the disease comprises achondroplasia and the gene is FGFR3. In some embodiments, the disease comprises Cri du chat syndrome and the gene is selected from CTNND2. In some embodiments, the disease comprises sickle cell anemia and the gene is Beta globin gene. In some embodiments, the disease comprises Alagille Syndrome and the gene is selected from JAG1 and NOTCH2. In some embodiments, the disease comprises Charcot Marie Tooth disease and the gene is selected from PMP22 and MFN2. In some embodiments, the disease comprises Crouzon syndrome and the gene is selected from FGFR2, FGFR3, and FGFR3. In some embodiments, the disease comprises Dravet Syndrome and the gene is selected from SCN1A and SCN2A. In some embodiments, the disease comprises Emery-Dreifuss syndrome and the gene is selected from EMD, LMNA, SYNE1, SYNE2, FHL1, and TMEM43. In some embodiments, the disease comprises Factor V Leiden thrombophilia and the gene is F5. In some embodiments, the disease comprises Fanconi anemia and the gene is selected from FANCA, FANCB, FANCC, FANCD1, FANCD2, FANCE, FANCF, FANCG, FANCI, FANCJ, FANCL, FANCM, FANCN, FANCP, FANCS, RAD51C, and XPF. In some embodiments, the disease comprises Familial Creutzfeld-Jakob disease and the gene is PRNP. In some embodiments, the disease comprises Familial Mediterranean Fever and the gene is MEFV. In some embodiments, the disease comprises Friedreich's ataxia and the gene is FXN. In some embodiments, the disease comprises Gaucher disease and the gene is GBA. In some embodiments, the disease comprises human papilloma virus (HPV) infection and the gene is HPV E7. In some embodiments, the disease comprises hemochromatosis and the gene is HFE, optionally comprising a C282Y mutation. In some embodiments, the disease comprises Hemophilia A and the gene is FVIII. In some embodiments, the disease comprises histiocytosis and the gene is CD1. In some embodiments, the disease comprises immunodeficiency 17 and the gene is CD3D. In some embodiments, the disease comprises immunodeficiency 13 and the gene is CD4. In some embodiments, the disease comprises Common Variable Immunodeficiency and the gene is selected from CD19 and CD81. In some embodiments, the disease comprises Joubert syndrome and the gene is selected from INPP5E, TMEM216, AHI1, NPHP1, CEP290, TMEM67, RPGRIP1L, ARL13B, CC2D2A, OFD1, TMEM138, TCTN3, ZNF423, and AMRC9. In some embodiments, the disease comprises leukocyte adhesion deficiency and the gene is CD18. In some embodiments, the disease comprises Li-Fraumeni syndrome and the gene is TP53. In some embodiments, the disease comprises lymphoproliferative syndrome and the gene is CD27. In some embodiments, the disease comprises Lynch syndrome and the gene is selected from MSH2, MLH1, MSH6, PMS2, PMS1, TGFBR2, and MLH3. In some embodiments, the disease comprises mantle cell lymphoma and the gene is CD5. In some embodiments, the disease comprises Marfan syndrome and the gene is FBN1. In some embodiments, the disease comprises mastocytosis and the gene is CD2. In some embodiments, the disease comprises methylmalonic acidemia and the gene is selected from MMAA, MMAB, and MUT. In some embodiments, the disease is mycosis fungoides and the gene is CD7. In some embodiments, the disease is myotonic dystrophy and the gene is selected from CNBP and DMPK. In some embodiments, the disease comprises neurofibromatosis and the gene is selected from NF1, and NF2. In some embodiments, the disease comprises osteogenesis imperfecta and the gene is selected from COL1A1, COL1A2, and IFITM5. In some embodiments, the disease is non-small cell lung cancer and the gene is selected from KRAS, EGFR, ALK, METex14, BRAF V600E, ROS1, RET, and NTRK. In some embodiments, the disease comprises Peutz-Jeghers syndrome and the gene is STK11. In some embodiments, the disease comprises polycystic kidney disease and the gene is selected from PKD1 and PKD2. In some embodiments, the disease comprises Severe Combined Immune Deficiency and the gene is selected from IL7R, RAG1, JAK3. In some embodiments, the disease comprises PRKAG2 cardiac syndrome and the gene is PRKAG2. In some embodiments, the disease comprises spinocerebellar ataxia and the gene is selected from ATXN1, ATXN2, ATXN3, PLEKHG4, SPTBN2, CACNA1A, ATXN7, ATXN8OS, ATXN10, TTBK2, PPP2R2B, KCNC3, PRKCG, ITPR1, TBP, KCND3, and FGF14. In some embodiments, the disease comprises Usher Syndrome and the gene is selected from MYO7A, USH1C, CDH23, PCDH15, USH1G, USH2A, GPR98, DFNB31, and CLRN1. In some embodiments, the disease comprises von Willebrand disease and the gene is VWF. In some embodiments, the disease comprises Waardenburg syndrome and the gene is selected from PAX3, MITF, WS2B, WS2C, SNAI2, EDNRB, EDN3, and SOX10. In some embodiments, the disease comprises Wiskott-Aldrich Syndrome and the gene is WAS. In some embodiments, the disease comprises von Hippel-Lindau disease and the gene is VHL. In some embodiments, the disease comprises Wilson disease and the gene is ATP7B. In some embodiments, the disease comprises Zellweger syndrome and the gene is selected from PEX1, PEX2, PEX3, PEX5, PEX6, PEX10, PEX12, PEX13, PEX14, PEX16, PEX19, and PEX26. In some embodiments, the disease comprises infantile myofibromatosis and the gene is CD34. In some embodiments, the disease comprises platelet glycoprotein IV deficiency and the gene is CD36. In some embodiments, the disease comprises immunodeficiency with hyper-IgM type 3 and the gene is CD40. In some embodiments, the disease comprises hemolytic uremic syndrome and the gene is CD46. In some embodiments, the disease comprises complement hyperactivation, angiopathic thrombosis, or protein-losing enteropathy and the gene is CD55. In some embodiments, the disease comprises hemolytic anemia and the gene is CD59. In some embodiments, the disease comprises calcification of joints and arteries and the gene is CD73. In some embodiments, the disease comprises immunoglobulin alpha deficiency and the gene is CD79A. In some embodiments, the disease comprises C syndrome and the gene is CD96. In some embodiments, the disease comprises hairy cell leukemia and the gene is CD123. In some embodiments, the disease comprises histiocytic sarcoma and the gene is CD163. In some embodiments, the disease comprises autosomal dominant deafness and the gene is CD164. In some embodiments, the disease comprises immunodeficiency 25 and the gene is CD247. In some embodiments, the disease comprises methymalonic acidemia due to transcobalamin receptor defect and the gene is CD320.

### Cancer

[0901] In some embodiments, the disease is cancer. In some embodiments, the cancer is a solid cancer (i.e., a tumor). In some embodiments, the cancer is selected from a blood cell cancer, a leukemia, and a lymphoma. The cancer can be a leukemia, such as, by way of non-limiting example, acute myeloid (or myelogenous) leukemia (AML), chronic myeloid (or myelogenous) leukemia (CML), acute lymphocytic (or lymphoblastic) leukemia (ALL), and chronic lymphocytic leukemia (CLL). In some embodiments, the cancer is any one of colon cancer, rectal cancer, renal-cell carcinoma, liver cancer, bladder cancer, cancer of the kidney or ureter, lung cancer, non-small cell lung cancer, cancer of the small intestine, esophageal cancer, melanoma, bone cancer, pancreatic cancer, skin cancer, brain cancer (e.g., glioblastoma), cancer of the head or neck, melanoma, uterine cancer, ovarian cancer, breast cancer, testicular cancer, cervical cancer, stomach cancer, Hodgkin's Disease, non-Hodgkin's lymphoma, and thyroid cancer.

[0902] In some embodiments, mutations are associated with cancer or are causative of cancer. The target nucleic acid, in some embodiments, comprises a portion of a gene comprising a mutation associated with cancer, a gene whose overexpression is associated with cancer, a tumor suppressor gene, an oncogene, a checkpoint inhibitor gene, a gene associated with cellular growth, a gene associated with cellular metabolism, a gene associated with cell cycle, or a combination thereof. Non-limiting examples of genes comprising a mutation associated with cancer are ABL, ACE, AF4/HRX, AKT-2, ALK, ALK/NPM, AML1, AML1/MTG8, APC, ATM AXIN2, AXL, BAP1, BARD1, BCL-2, BCL-3, BCL-6, BCR/ABL, BLM BMPR1A, BRCA1, BRCA2, BRIP1, c-MYC, CASR, CCR5, CDC73, CDH1, CDK4, CDKN1B, CDKN1C, CDKN2A, CEBPA, CHEK2, CREBBP, CTNNA1, DBL, DEK/CAN DICER1, DIS3L2, E2A/PBX1, EGFR, ENL/HRX, EPCAM, ERG/TLS, ERBB, ERBB-2, ETS-1, EWS/FLI-1, FH, FKRP, FLCN, FMS, FOS, FPS, GATA2, GCG, GLI, GPC3, GPGSP, GREM1, HER2/neu, HOX11, HOXB13, HRAS, HST, IL-3, INT-2, JAK1, JUN KIT, KS3, K-SAM, LBC, LCK, L-MYC, LYL-1, LYT-10, LYT-10/Cα1, MAS, MAX MDM-2, MEN1, MET, MITF, MLH1, MLL, MOS, MSH1, MSH2, MSH3, MSH6, MTG8/AML1, MUTYH, MYB, MY H11/CBFB, NBN NEU, NF1, NF2, N-MYC, NTHL1, OST, PALB2, PAX-5, PBX1/E2A, PCDC1, PDGFRA, PHOX2B, PMS2, POLD1, POLE, POT1, PPARG, PRAD-1, PRKAR1A, PTCH1, PTEN, RAD50, RAD51C, RAD51D, RAF, RAR/PML, RAS-H, RAS-K, RAS-N, RB1, RECQL4, REL/NRG, RET, RHOM1, RHOM2, ROS, RUNX1, SDHA, SDHAF, SDHAF2, SDHB, SDHC, SDHD, SET/CAN, SIS, SKI, SMAD4, SMARCA4, SMARCB1, SMARCE1, SRC, STK11, SUFU, TAL1, TAL2, TAN-1, TIAM1, TERC, TERT, TIMP3, TMEM127, TNF, TP53, TRAC, TSC1, TSC2, TRK, VHL, WRN, and WT1. Non-limiting examples of oncogenes are KRAS, NRAS, BRAF, MYC, CTNNB1, and EGFR. In some instances, the oncogene is a gene that encodes a cyclin dependent kinase (CDK). Non-limiting examples of CDKs are CDK1, CDK4, CDK5, CDK7, CDK8, CDK9, CDK11 and CDK20. Non-limiting examples of tumor suppressor genes are TP53, RB1, and PTEN.

### Infections

[0903] Described herein are methods for treating an infection in a subject, wherein the infection is caused by one or more pathogens, parasites, or any combination thereof. Such methods can include modifying a target nucleic acid associated with the pathogen or parasite causing the infection. Compositions and methods may modify a target nucleic acid associated with the pathogen or parasite causing the infection. In some embodiments, the target nucleic acid can be in the pathogen or parasite itself or in a cell, tissue or organ of the subject that the pathogen or parasite infects. In some embodiments, the pathogen is a bacteria, a virus, a fungus, or any combination thereof. In some embodiments, the methods described herein include treating an infection cause by one or more bacterial pathogens. Such bacterial pathogens, in some embodiments, comprise, without limitation, Acholeplasma laidlawii, Brucella abortus, Chlamydia psittaci, Chlamydia trachomatis, Cryptococcus neoformans, Escherichia coli, Legionella pneumophila, Lyme disease spirochetes, methicillin-resistant Staphylococcus aureus, Mycobacterium leprae, Mycobacterium tuberculosis, Mycoplasma arginini, Mycoplasma arthritidis, Mycoplasma genitalium, Mycoplasma hyorhinis, Mycoplasma orale, Mycoplasma pneumoniae, Mycoplasma salivarium, Neisseria gonorrhoeae, Neisseria meningitidis, Pneumococcus, Pseudomonas aeruginosa, sexually transmitted infection, Streptococcus agalactiae, Streptococcus pyogenes, Treponema pallidum, or any combination thereof.

[0904] In some embodiments, the methods described herein include treating an infection cause by one or more viral pathogens. Such viral pathogens, in some embodiments, comprise, without limitation, adenovirus, blue tongue virus, chikungunya, coronavirus (e.g. SARS-CoV-2), cytomegalovirus, Dengue virus, Ebola, Epstein-Barr virus, feline leukemia virus, Hemophilus influenzae B, Hepatitis Virus A, Hepatitis Virus B, Hepatitis Virus C, herpes simplex virus I, herpes simplex virus II, human papillomavirus (HPV), human serum parvo-like virus, human T-cell leukemia viruses, immunodeficiency virus (e.g. HIV), influenza virus, lymphocytic choriomeningitis virus, measles virus, mouse mammary tumor virus, mumps virus, murine leukemia virus, polio virus, rabies virus, Reovirus, respiratory syncytial virus (RSV), rubella virus, Sendai virus, simian virus 40, Sindbis virus, varicella-zoster virus, vesicular stomatitis virus, wart virus, West Nile virus, yellow fever virus, or any combination thereof.

[0905] In some embodiments, the methods described herein include treating an infection cause by one or more parasites. Such parasites, in some embodiments comprise, without limitation, helminths, annelids, platyhelminths, nematodes, and thorny-headed worms. In some embodiments, parasitic pathogens comprise, without limitation, Babesia bovis, Echinococcus granulosus, Eimeria tenella, Leishmania tropica, Mesocestoides corti, Onchocerca volvulus, Plasmodium falciparum, Plasmodium vivax, Schistosoma japonicum, Schistosoma mansoni, Taenia hydatigena, Taenia ovis, Taenia saginata, Theileria parva, Toxoplasma gondii, Trichinella spiralis, Trichomonas vaginalis, Trypanosoma brucei, Trypanosoma cruzi, Trypanosoma rangeli, Trypanosoma rhodesiense, Balantidium coli, Entamoeba histolytica, Giardia spp., Isospora spp., Trichomonas spp., or any combination thereof.

### XV. Methods of Modifying Target Nucleic Acids

[0906] Disclosed herein are compositions and methods for modifying a target nucleic acid. The target nucleic acid may be a gene or a portion thereof. Methods and compositions may modify a coding portion of a gene, a non-coding portion of a gene, or a combination thereof. Modifying at least one gene using the compositions and methods described herein can, in some embodiments, induce a reduction or increase in expression of the one or more genes. In some embodiments, the at least one modified gene results in a reduction in expression, also referred to as gene silencing. In some embodiments, the gene silencing reduces expression of one or more genes by at least 10%, at least 20%, at least 30%, at least 40%, at least 50%, at least 60%, at least 70%, at least 80%, at least 90%, or at least 95%. In some embodiments, compositions and methods remove all expression of a gene, also referred to as genetic knock out. In some embodiments, compositions and methods increase expression of one or more genes by at least 10%, at least 20%, at least 30%, at least 40%, at least 50%, at least 60%, at least 70%, at least 80%, at least 90%, or at least 100%. In some embodiments, gene silencing is accomplished by transcriptional silencing, post-transcriptional silencing, or meiotic silencing. In some embodiments, transcriptional silencing is by genomic imprinting, paramutation, transposon silencing, position effect, or RNA-directed DNA methylation. In some embodiments, post-transcriptional silencing is by RNA interference, RNA silencing, or nonsense mediated decay. In some embodiments, meiotic silencing is by transvection or meiotic silencing of unpaired DNA. In some embodiments, the at least one modified gene results in removing all expression, also referred to as the gene being knocked out (KO).

[0907] In some embodiments, a gene is modified by repairing or editing a mutation as described herein. In some cases, a Cas protein is used to effect the modification. Cas proteins may be fused to transcription activators or transcriptional repressors or deaminases or other nucleic acid modifying proteins. In some instances, compositions and methods use Cas proteins that are fused to a heterologous protein. Heterologous proteins include, but are not limited to, transcriptional activators, transcriptional repressors, deaminases, methyltransferases, acetyltransferases, and other nucleic acid modifying proteins. In some cases, Cas proteins need not be fused to a partner protein to accomplish the required protein (expression) modification.

[0908] In some embodiments, compositions and methods comprise a nucleic acid expression vector, or use thereof, to introduce a Cas protein, guide nucleic acid, donor template or any combination thereof to a cell. In some embodiments, the nucleic acid expression vector is a viral vector. Viral vectors include, but are not limited to, retroviruses, adenoviruses, adeno-associated viruses, and herpes simplex viruses. In some embodiments, the viral vector is a replication-defective viral vector, comprising an insertion of a therapeutic gene inserted in genes essential to the lytic cycle, preventing the virus from replicating and exerting cytotoxic effects. In some embodiments, the viral vector is an adeno associated viral (AAV) vector. In some embodiments, the nucleic acid expression vector is a non-viral vector. In some embodiments, compositions and methods comprise a lipid, polymer, nanoparticle, or a combination thereof, or use thereof, to introduce a Cas protein, guide nucleic acid, donor template or any combination thereof to a cell. Non-limiting examples of lipids and polymers are cationic polymers, cationic lipids, or bio-responsive polymers. In some embodiments, the bio-responsive polymer exploits chemical-physical properties of the endosomal environment (e.g., pH) to preferentially release the genetic material in the intracellular space.

[0909] In some embodiments, treatment of a disease comprises administration of a gene therapy. “Gene therapy”, as used herein, comprises use of a recombinant nucleic acid (DNA or RNA), administered for the purpose to adjust, repair, replace, add, or remove a gene sequence. In some embodiments, a gene therapy comprises use of a vector to introduce a functional gene or transgene. In some embodiments, vectors comprise nonviral vectors, including cationic polymers, cationic lipids, or bio-responsive polymers. In some embodiments, the bio-responsive polymer exploits chemical-physical properties of the endosomal environment (e.g., pH) to preferentially release the genetic material in the intracellular space. In some embodiments, vectors comprise viral vectors, including retroviruses, adenoviruses, adeno-associated viruses, and herpes simplex viruses. In some embodiments, the vector comprises a replication-defective viral vector, comprising an insertion of a therapeutic gene inserted in genes essential to the lytic cycle, preventing the virus from replicating and exerting cytotoxic effects. Methods of gene therapy are described in more detail in Ingusci et al., “Gene Therapy Tools for Brain Diseases”, Front. Pharmacol. 10:724 (2019) which is hereby incorporated by reference in its entirety.

[0910] It is known that CRISPR-Cas9 gene editing techniques may select for p53-mutated cells. Similarly, the presence of KRAS mutations provides a selective advantage during CRISPR-Cas9 gene editing, as further described in Sinha et al., “A systematic genome-wide mapping of oncogenic mutation selection during CRISPR-Cas9 genome editing”, Nature Comm. 12:6512 (2021), which is hereby incorporated by reference in its entirety. In some embodiments, a genome targeted for treatment comprises a wild-type p53 gene, a wild-type KRAS gene, a mutated p53 gene, a mutated KRAS gene, or any combination thereof. In some embodiments, the genome comprises a p53 mutation and the target gene comprises WDR48, H2AFX, FANCG, BRIP1, HUS1, XRCC3, PALB2, FANCL, FANCA, FANCC, BRCA1, BRCA2, or any combination thereof. In some embodiments, the genome comprises a wild-type p53 and the target gene comprises CCNB1, MCM6, ANAPC11, ANAPC10, CDKN1A, or any combination thereof. In some embodiments, the genome comprises a KRAS mutation and the target gene comprises CRYAA, RTCA, LOR, SLC35B4, EN1, CELA3B, NOG, or any combination thereof.

[0911] In some instances, the compositions described herein are for use in therapy. For example, in some instances, the compositions described herein are for use in treating a disease or condition described herein.

[0912] Also provided is the use of the compositions described herein in the manufacture of a medicament. Also provided is the use of the compositions described herein in the manufacture of a medicament for therapeutic and/or prophylactic treatment of a disease or condition described herein.

### XVI. Target Nucleic Acids and Samples

[0913] Disclosed herein are compositions, systems and methods for detecting and/or modifying a target nucleic acid. In some instances, the target nucleic acid is a single stranded nucleic acid. Alternatively, or in combination, the target nucleic acid is a double stranded nucleic acid and is prepared into single stranded nucleic acids before or upon contacting the reagents. In some instances, the target nucleic acid is a double stranded nucleic acid. In some instances, the double stranded nucleic acid is DNA. The target nucleic acid may be a RNA. The target nucleic acids include but are not limited to mRNA, rRNA, tRNA, non-coding RNA, long non-coding RNA, and microRNA (miRNA). In some instances, the target nucleic acid is complementary DNA (cDNA) synthesized from a single-stranded RNA template in a reaction catalyzed by a reverse transcriptase. In some cases, the target nucleic acid is single-stranded RNA (ssRNA) or mRNA. In some cases, the target nucleic acid is from a virus, a parasite, or a bacterium described herein. As another non-limiting example, the target nucleic acid may be responsible for a disease, contain a mutation (e.g., single strand polymorphism, point mutation, insertion, or deletion), be contained in an amplicon, or be uniquely identifiable from the surrounding nucleic acids (e.g., contain a unique sequence of nucleotides).

[0914] In certain embodiments, the target nucleic acid is a double stranded nucleic acid comprising a target strand and a non-target strand, wherein the target strand comprises a target sequence. In some embodiments, where a target strand comprises a target sequence, at least a portion of the engineered guide nucleic acid is complementary to the target sequence on the target strand. In some embodiments, where the target nucleic acid is a double stranded nucleic acid comprising a target strand and a non-target strand, and wherein the target strand comprises a target sequence, at least a portion of the engineered guide nucleic acid is complementary to the target sequence on the target strand. In some embodiments, a target nucleic acid comprises a PAM as described herein that is located on the non-target strand. Such a PAM described herein, in some embodiments, is adjacent (e.g., within 1, 2, 3, 4 or 5 nucleotides) to the 5′ end of the target sequence on the non-target strand of the double stranded DNA molecule. In certain embodiments, such a PAM described herein is directly adjacent to the 5′ end of a target sequence on the non-target strand of the double stranded DNA molecule.

[0915] In some cases, an effector protein (e.g., a D2S effector protein) or a multimeric complex thereof recognizes a PAM on a target nucleic acid. In some cases, multiple effector proteins of the multimeric complex recognize a PAM on a target nucleic acid. In some cases, only one effector protein of the multimeric complex recognizes a PAM on a target nucleic acid. In some cases, the PAM is 3′ to the spacer region of the crRNA. In some cases, the PAM is directly 3′ to the spacer region of the crRNA. In some cases, the PAM sequence comprises a sequence listed in TABLE 6. In some instances, the PAM sequence comprises a sequence listed in TABLE 13. In some instances the PAM sequence comprises a sequence listed in TABLE 14. In some instances the PAM sequence comprises a sequence listed in TABLE 16. In some instances the PAM sequence comprises a sequence listed in TABLE 17. In some instances, the PAM sequence comprises a sequence listed in TABLE 20. In some instances, the PAM sequence comprises a sequence listed in TABLE 21. In some instances, the PAM sequence comprises a sequence listed in TABLE 23 In some instances, the PAM sequence comprises a sequence listed in TABLE 24.

[0916] A D2S effector protein of the present disclosure, a dimer thereof, or a multimeric complex thereof may cleave or nick a target nucleic acid within or near a protospacer adjacent motif (PAM) sequence of the target nucleic acid. In some instances, cleavage occurs within 1, 2, 3, 4, 5, 6, 7, 8, 9 or 10 nucleosides of a 5′ or 3′ terminus of a PAM sequence. A target nucleic acid may comprise a PAM sequence adjacent to a sequence that is complementary to a guide nucleic acid spacer region. In some cases, the PAM sequence is 5′-CTT-3′ (SEQ ID NO: 154). In some cases, the PAM sequence is 5′-CC-3′ (SEQ ID NO: 155). In some cases, the PAM sequence is 5′-TCG-3′ (SEQ ID NO: 156). In some cases, the PAM sequence is 5′-GCG-3′ (SEQ ID NO: 157). In some cases, the PAM sequence is 5′-TTG-3′ (SEQ ID NO: 158). In some cases, the PAM sequence is 5′-GTG-3′ (SEQ ID NO: 159). In some cases, the PAM sequence is 5′-ATTA-3′ (SEQ ID NO: 160). In some cases, the PAM sequence is 5′-ATTG-3′ (SEQ ID NO: 161). In some cases, the PAM sequence is 5′-GTTA-3′ (SEQ ID NO: 162). In some cases, the PAM sequence is 5′-GTTG-3′ (SEQ ID NO: 163). In some cases, the PAM sequence is 5′-TC-3′ (SEQ ID NO: 164). In some cases, the PAM sequence is 5′-ACTG-3′ (SEQ ID NO: 165). In some cases, the PAM sequence is 5′-GCTG-3′ (SEQ ID NO: 166). In some cases, the PAM sequence is 5′-TTC-3′ (SEQ ID NO: 167). In some cases, the PAM sequence is 5′-TTT-3′ (SEQ ID NO: 168).

[0917] In some cases, the PAM sequence is 5′-G-3′ (SEQ ID NO: 301). In some cases, the PAM sequence is 5′-T-3′ (SEQ ID NO: 302). In some cases, the PAM sequence is 5′-NRNNNNN-3′ (SEQ ID NO: 303). In some cases, the PAM sequence is 5′-NNANRTT-3′ (SEQ ID NO: 304). In some cases, the PAM sequence is 5′-NNKRTTN-3′ (SEQ ID NO: 305). In some cases, the PAM sequence is 5′-NNNCTTN-3′ (SEQ ID NO: 306). In some cases, the PAM sequence is 5′-NNNGNNN-3′ (SEQ ID NO: 307). In some cases, the PAM sequence is 5′-NNNGTYG-3′ (SEQ ID NO: 308). In some cases, the PAM sequence is 5′-NNNGTYN-3′ (SEQ ID NO: 309). In some cases, the PAM sequence is 5′-NNNKNTK-3′ (SEQ ID NO: 310). In some cases, the PAM sequence is 5′-NNNKNTT-3′ (SEQ ID NO: 311). In some cases, the PAM sequence is 5′-NNNNCCN-3′ (SEQ ID NO: 312). In some cases, the PAM sequence is 5′-NNNNCCR-3′ (SEQ ID NO: 313). In some cases, the PAM sequence is 5′-NNNNCTT-3′ (SEQ ID NO: 314). In some cases, the PAM sequence is 5′-CC-3′ (SEQ ID NO: 315). In some cases, the PAM sequence is 5′-CG-3′ (SEQ ID NO: 316). In some cases, the PAM sequence is 5′-CT-3′ (SEQ ID NO: 317). In some cases, the PAM sequence is 5′-TG-3′ (SEQ ID NO: 318). In some cases, the PAM sequence is 5′-TN-3′ (SEQ ID NO: 319). In some cases, the PAM sequence is 5′-TY-3′ (SEQ ID NO: 320). In some cases, the PAM sequence is 5′-3′ (SEQ ID NO: 321). In some cases, the PAM sequence is 5′-R-3′ (SEQ ID NO: 322). In some cases, the PAM sequence is 5′-T-3′ (SEQ ID NO: 323). In some cases, the PAM sequence is 5′-NNNNRTT-3′ (SEQ ID NO: 324). In some cases, the PAM sequence is 5′-NNNNTCG-3′ (SEQ ID NO: 325). In some cases, the PAM sequence is 5′-NNNNKCG-3′ (SEQ ID NO: 326). In some cases, the PAM sequence is 5′-NNNNKYG-3′ (SEQ ID NO: 327). In some cases, the PAM sequence is 5′-NNNNTYG-3′ (SEQ ID NO: 328). In some cases, the PAM sequence is 5′-NNNNTNN-3′ (SEQ ID NO: 329). In some cases, the PAM sequence is 5′-NNNNTNY-3′ (SEQ ID NO: 330). In some cases, the PAM sequence is 5′-NNNNTTC-3′ (SEQ ID NO: 331). In some cases, the PAM sequence is 5′-NNNNTTN-3′ (SEQ ID NO: 332). In some cases, the PAM sequence is 5′-NNNNTTY-3′ (SEQ ID NO: 333). In some cases, the PAM sequence is 5′-NNNNTYC-3′ (SEQ ID NO: 334). In some cases, the PAM sequence is 5′-NNNNTYN-3′ (SEQ ID NO: 335). In some cases, the PAM sequence is 5′-NNNNTYR-3′ (SEQ ID NO: 336). In some cases, the PAM sequence is 5′-NNNNYTC-3′ (SEQ ID NO: 337). In some cases, the PAM sequence is 5′-NNNNYTN-3′ (SEQ ID NO: 338). In some cases, the PAM sequence is 5′-NNNNYTY-3′ (SEQ ID NO: 339). In some cases, the PAM sequence is 5′-C-3′ (SEQ ID NO: 340). In some cases, the PAM sequence is 5′-NNNRNNG-3′ (SEQ ID NO: 341). In some cases, the PAM sequence is 5′-NNNRTNG-3′ (SEQ ID NO: 342). In some cases, the PAM sequence is 5′-NNNRTRG-3′ (SEQ ID NO: 343). In some cases, the PAM sequence is 5′-NNNRTTG-3′ (SEQ ID NO: 344). In some cases, the PAM sequence is 5′-NNNRTTN-3′ (SEQ ID NO: 345). In some cases, the PAM sequence is 5′-NNNRTWG-3′ (SEQ ID NO: 346). In some cases, the PAM sequence is 5′-NNNTKCG-3′ (SEQ ID NO: 347). In some cases, the PAM sequence is 5′-NNNTNCG-3′ (SEQ ID NO: 348). In some cases, the PAM sequence is 5′-NNNTNTG-3′ (SEQ ID NO: 349). In some cases, the PAM sequence is 5′-NNNTNYN-3′ (SEQ ID NO: 350). In some cases, the PAM sequence is 5′-NNNTTCN-3′ (SEQ ID NO: 351). In some cases, the PAM sequence is 5′-NNNTTNY-3′ (SEQ ID NO: 352). In some cases, the PAM sequence is 5′-NNNTTTN-3′ (SEQ ID NO: 353). In some cases, the PAM sequence is 5′-NNNTTYN-3′ (SEQ ID NO: 354). In some cases, the PAM sequence is 5′-NNNTYCT-3′ (SEQ ID NO: 355). In some cases, the PAM sequence is 5′-NNNTYYN-3′ (SEQ ID NO: 356). In some cases, the PAM sequence is 5′-NNNTYYW-3′ (SEQ ID NO: 357). In some cases, the PAM sequence is 5′-CT-3′ (SEQ ID NO: 358). In some cases, the PAM sequence is 5′-NNNTYYT-3′ (SEQ ID NO: 359). In some cases, the PAM sequence is 5′-TG-3′ (SEQ ID NO: 360). In some cases, the PAM sequence is 5′-NNNWYTG-3′ (SEQ ID NO: 361). In some cases, the PAM sequence is 5′-NNNYTTR-3′ (SEQ ID NO: 362). In some cases, the PAM sequence is 5′-NNRGTYG-3′ (SEQ ID NO: 363). In some cases, the PAM sequence is 5′-NNTNTR-3′ (SEQ ID NO: 364). In some cases, the PAM sequence is 5′-NNTTTYN-3′ (SEQ ID NO: 365). In some cases, the PAM sequence is 5′-NNWTTYN-3′ (SEQ ID NO: 366). In some cases, the PAM sequence is 5′-NNWWTTN-3′ (SEQ ID NO: 367).

[0918] In some cases, the PAM sequence is 5′-TNTG-3′ (SEQ ID NO: 368). In some cases, the PAM sequence is 5′-NTCG-3′ (SEQ ID NO: 369). In some cases, the PAM sequence is 5′-RTTR-3′ (SEQ ID NO: 370). In some cases, the PAM sequence is 5′-NTTC-3′ (SEQ ID NO: 371). In some cases, the PAM sequence is 5′-TCG-3′ (SEQ ID NO: 156). In some cases, the PAM sequence is 5′-TTR-3′ (SEQ ID NO: 786). In some cases, the PAM sequence is 5′-TR-3′ (SEQ ID NO: 787). In some cases, the PAM sequence is 5′-TTTR-3′ (SEQ ID NO: 788). In some cases, the PAM sequence is 5′-CC—3′ (SEQ ID NO: 155). In some cases, the PAM sequence is 5′-TTTYC-3′ (SEQ ID NO: 789). In some cases, the PAM sequence is 5′-CCN-3′ (SEQ ID NO: 790). In some cases, the PAM sequence is 5′-TG-3′ (SEQ ID NO: 791). In some cases, the PAM sequence is 5′-TNTG-3′ (SEQ ID NO: 368). In some cases, the PAM sequence is 5′-GGTYG-3′ (SEQ ID NO: 792). In some cases, the PAM sequence is 5′-TTTC-3′(SEQ ID NO: 930). In some cases, the PAM sequence is 5′-WTTR-3′ (SEQ ID NO: 931).

[0919] In some cases, a PAM sequence comprises a sequence in TABLE 39. TABLE 39 shows PAM sequences that are associated with different effector proteins.

TABLE 39
PAM Sequences Associated With Various Effector
Proteins

| Enzyme | |
|---|---|
| SEQ ID | |
| NO | Associated PAMs |
| 1 | CTT |
| 4 | TTC, TTTC |
| 5 | TTY |
| 8 | TTC, YTN |
| 9 | GNNN |
| 12 | YTTR, TTYN |
| 13 | CTT |
| 14 | CC |
| 15 | CC |
| 16 | CC |
| 18 | CC |
| 19 | CC |
| 20 | CC |
| 21 | TC |
| 22 | TCG |
| 23 | TCG, KYG |
| 24 | TCG |
| 25 | RTTR |
| 26 | TCG |
| 28 | RTTR |
| 29 | RTTG, RTTR |
| 30 | TCG, RTTR |
| 31 | RTTR |
| 32 | TCG, KCG |
| 33 | KNTK, KNTT |
| 34 | RTTR |
| 35 | TTC, YTC |
| 36 | TTC, TTCN |
| 37 | TTY, TY |
| 38 | TTC, TTCN |
| 39 | TYYT, YN, CTTN, T |
| 40 | TTC |
| 41 | YT, WNCT |
| 42 | TTC, TTYN, TYYW |
| 43 | TTC |
| 44 | TTY |
| 45 | TTY, TY, TTC |
| 202 | RTTN, TCG, RTTR, KRTTN |
| 203 | CCN, CCR |
| 204 | TTYN, WTTYN |
| 205 | RTTN |
| 206 | TG, TNTG, G |
| 207 | RTT, ANRTT |
| 208 | RTTR, RTWG |
| 209 | CCN |
| 210 | TTYN, YN, YTTR |
| 212 | TTTN |
| 213 | GTYG, RGTYG |
| 215 | RTRG |
| 216 | RTNG |
| 217 | RTTN |
| 219 | RTTR |
| 220 | TCG, KCG |
| 221 | TG, WNTG |
| 222 | RTTR |
| 225 | RTRG |
| 227 | TYN |
| 228 | TG, TNTG, WYTG, WNTG, |
| 229 | TCG, RTTR |
| 231 | CCN, CCR |
| 232 | TYN, WWTTN, TTTYN |
| 233 | TG, TNTG, WNTG |
| 234 | TTC, TTNY |
| 236 | TCG, RTTR |
| 237 | RTTR |
| 238 | TCG |
| 239 | CC |
| 240 | TTR, WTTR, RTRG |

[0920] In some instances, the effector protein comprises an amino acid sequence that is at least 70%, at least 75%, at least 80%, at least 85%, at least 90%, at least 95%, at least 98%, at least 99%, or 100% identical to SEQ ID NO: 1, and the target nucleic acid comprises a PAM sequence of CTT (SEQ ID NO: 154). In some instances, the effector protein comprises an amino acid sequence that is at least 70%, at least 75%, at least 80%, at least 85%, at least 90%, at least 95%, at least 98%, at least 99%, or 100% identical to SEQ ID NO: 13, and the target nucleic acid comprises a PAM sequence of CTT (SEQ ID NO: 154).

[0921] In some instances, the effector protein comprises an amino acid sequence that is at least 70%, at least 75%, at least 80%, at least 85%, at least 90%, at least 95%, at least 98%, at least 99%, or 100% identical to SEQ ID NO: 15, and the target nucleic acid comprises a PAM sequence of CC (SEQ ID NO: 155). In some instances, the effector protein comprises an amino acid sequence that is at least 70%, at least 75%, at least 80%, at least 85%, at least 90%, at least 95%, at least 98%, at least 99%, or 100% identical to SEQ ID NO: 22, and the target nucleic acid comprises a PAM sequence of TCG (SEQ ID NO: 156). In some instances, the effector protein comprises an amino acid sequence that is at least 70%, at least 75%, at least 80%, at least 85%, at least 90%, at least 95%, at least 98%, at least 99%, or 100% identical to SEQ ID NO: 22, and the target nucleic acid comprises a PAM sequence of GCG (SEQ ID NO: 157).

[0922] In some instances, the effector protein comprises an amino acid sequence that is at least 70%, at least 75%, at least 80%, at least 85%, at least 90%, at least 95%, at least 98%, at least 99%, or 100% identical to SEQ ID NO: 23, and the target nucleic acid comprises a PAM sequence of TCG (SEQ ID NO: 156). In some instances, the effector protein comprises an amino acid sequence that is at least 70%, at least 75%, at least 80%, at least 85%, at least 90%, at least 95%, at least 98%, at least 99%, or 100% identical to SEQ ID NO: 23, and the target nucleic acid comprises a PAM sequence of TTG (SEQ ID NO: 158). In some instances, the effector protein comprises an amino acid sequence that is at least 70%, at least 75%, at least 80%, at least 85%, at least 90%, at least 95%, at least 98%, at least 99%, or 100% identical to SEQ ID NO: 23, and the target nucleic acid comprises a PAM sequence of GCG (SEQ ID NO: 157). In some instances, the effector protein comprises an amino acid sequence that is at least 70%, at least 75%, at least 80%, at least 85%, at least 90%, at least 95%, at least 98%, at least 99%, or 100% identical to SEQ ID NO: 23, and the target nucleic acid comprises a PAM sequence of GTG (SEQ ID NO: 159).

[0923] In some instances, the effector protein comprises an amino acid sequence that is at least 70%, at least 75%, at least 80%, at least 85%, at least 90%, at least 95%, at least 98%, at least 99%, or 100% identical to SEQ ID NO: 24, and the target nucleic acid comprises a PAM sequence of TCG (SEQ ID NO: 156).

[0924] In some instances, the effector protein comprises an amino acid sequence that is at least 70%, at least 75%, at least 80%, at least 85%, at least 90%, at least 95%, at least 98%, at least 99%, or 100% identical to SEQ ID NO: 25, and the target nucleic acid comprises a PAM sequence of ATTA (SEQ ID NO: 160). In some instances, the effector protein comprises an amino acid sequence that is at least 70%, at least 75%, at least 80%, at least 85%, at least 90%, at least 95%, at least 98%, at least 99%, or 100% identical to SEQ ID NO: 25, and the target nucleic acid comprises a PAM sequence of ATTG (SEQ ID NO: 161). In some instances, the effector protein comprises an amino acid sequence that is at least 70%, at least 75%, at least 80%, at least 85%, at least 90%, at least 95%, at least 98%, at least 99%, or 100% identical to SEQ ID NO: 25, and the target nucleic acid comprises a PAM sequence of GTTA (SEQ ID NO: 162). In some instances, the effector protein comprises an amino acid sequence that is at least 70%, at least 75%, at least 80%, at least 85%, at least 90%, at least 95%, at least 98%, at least 99%, or 100% identical to SEQ ID NO: 25, and the target nucleic acid comprises a PAM sequence of GTTG (SEQ ID NO: 163).

[0925] In some instances, the effector protein comprises an amino acid sequence that is at least 70%, at least 75%, at least 80%, at least 85%, at least 90%, at least 95%, at least 98%, at least 99%, or 100% identical to SEQ ID NO: 26, and the target nucleic acid comprises a PAM sequence of TCG (SEQ ID NO: 156).

[0926] In some instances, the effector protein comprises an amino acid sequence that is at least 70%, at least 75%, at least 80%, at least 85%, at least 90%, at least 95%, at least 98%, at least 99%, or 100% identical to SEQ ID NO: 28, and the target nucleic acid comprises a PAM sequence of ATTA (SEQ ID NO: 160). In some instances, the effector protein comprises an amino acid sequence that is at least 70%, at least 75%, at least 80%, at least 85%, at least 90%, at least 95%, at least 98%, at least 99%, or 100% identical to SEQ ID NO: 28, and the target nucleic acid comprises a PAM sequence of ATTG (SEQ ID NO: 161). In some instances, the effector protein comprises an amino acid sequence that is at least 70%, at least 75%, at least 80%, at least 85%, at least 90%, at least 95%, at least 98%, at least 99%, or 100% identical to SEQ ID NO: 28, and the target nucleic acid comprises a PAM sequence of GTTA (SEQ ID NO: 1632). In some instances, the effector protein comprises an amino acid sequence that is at least 70%, at least 75%, at least 80%, at least 85%, at least 90%, at least 95%, at least 98%, at least 99%, or 100% identical to SEQ ID NO: 28, and the target nucleic acid comprises a PAM sequence of GTTG (SEQ ID NO: 163).

[0927] In some instances, the effector protein comprises an amino acid sequence that is at least 70%, at least 75%, at least 80%, at least 85%, at least 90%, at least 95%, at least 98%, at least 99%, or 100% identical to SEQ ID NO: 31, and the target nucleic acid comprises a PAM sequence of ATTA (SEQ ID NO: 160). In some instances, the effector protein comprises an amino acid sequence that is at least 70%, at least 75%, at least 80%, at least 85%, at least 90%, at least 95%, at least 98%, at least 99%, or 100% identical to SEQ ID NO: 31, and the target nucleic acid comprises a PAM sequence of ATTG (SEQ ID NO: 161). In some instances, the effector protein comprises an amino acid sequence that is at least 70%, at least 75%, at least 80%, at least 85%, at least 90%, at least 95%, at least 98%, at least 99%, or 100% identical to SEQ ID NO: 31, and the target nucleic acid comprises a PAM sequence of GTTA (SEQ ID NO: 162). In some instances, the effector protein comprises an amino acid sequence that is at least 70%, at least 75%, at least 80%, at least 85%, at least 90%, at least 95%, at least 98%, at least 99%, or 100% identical to SEQ ID NO: 31, and the target nucleic acid comprises a PAM sequence of GTTG (SEQ ID NO: 163).

[0928] In some instances, the effector protein comprises an amino acid sequence that is at least 70%, at least 75%, at least 80%, at least 85%, at least 90%, at least 95%, at least 98%, at least 99%, or 100% identical to SEQ ID NO: 32, and the target nucleic acid comprises a PAM sequence of TCG (SEQ ID NO: 156). In some instances, the effector protein comprises an amino acid sequence that is at least 70%, at least 75%, at least 80%, at least 85%, at least 90%, at least 95%, at least 98%, at least 99%, or 100% identical to SEQ ID NO: 32, and the target nucleic acid comprises a PAM sequence of GCG (SEQ ID NO: 157).

[0929] In some instances, the effector protein comprises an amino acid sequence that is at least 70%, at least 75%, at least 80%, at least 85%, at least 90%, at least 95%, at least 98%, at least 99%, or 100% identical to SEQ ID NO: 21, and the target nucleic acid comprises a PAM sequence of TC (SEQ ID NO: 164).

[0930] In some instances, the effector protein comprises an amino acid sequence that is at least 70%, at least 75%, at least 80%, at least 85%, at least 90%, at least 95%, at least 98%, at least 99%, or 100% identical to SEQ ID NO: 29, and the target nucleic acid comprises a PAM sequence of ATTG (SEQ ID NO: 161). In some instances, the effector protein comprises an amino acid sequence that is at least 70%, at least 75%, at least 80%, at least 85%, at least 90%, at least 95%, at least 98%, at least 99%, or 100% identical to SEQ ID NO: 29, and the target nucleic acid comprises a PAM sequence of ACTG (SEQ ID NO: 165). In some instances, the effector protein comprises an amino acid sequence that is at least 70%, at least 75%, at least 80%, at least 85%, at least 90%, at least 95%, at least 98%, at least 99%, or 100% identical to SEQ ID NO: 29, and the target nucleic acid comprises a PAM sequence of GTTG (SEQ ID NO: 163). In some instances, the effector protein comprises an amino acid sequence that is at least 70%, at least 75%, at least 80%, at least 85%, at least 90%, at least 95%, at least 98%, at least 99%, or 100% identical to SEQ ID NO: 29, and the target nucleic acid comprises a PAM sequence of GCTG (SEQ ID NO: 166).

[0931] In some instances, the effector protein comprises an amino acid sequence that is at least 70%, at least 75%, at least 80%, at least 85%, at least 90%, at least 95%, at least 98%, at least 99%, or 100% identical to SEQ ID NO: 30, and the target nucleic acid comprises a PAM sequence of TCG (SEQ ID NO: 156).

[0932] In some instances, the effector protein comprises an amino acid sequence that is at least 70%, at least 75%, at least 80%, at least 85%, at least 90%, at least 95%, at least 98%, at least 99%, or 100% identical to SEQ ID NO: 34, and the target nucleic acid comprises a PAM sequence of ATTA (SEQ ID NO: 160). In some instances, the effector protein comprises an amino acid sequence that is at least 70%, at least 75%, at least 80%, at least 85%, at least 90%, at least 95%, at least 98%, at least 99%, or 100% identical to SEQ ID NO: 34, and the target nucleic acid comprises a PAM sequence of ATTG (SEQ ID NO: 161). In some instances, the effector protein comprises an amino acid sequence that is at least 70%, at least 75%, at least 80%, at least 85%, at least 90%, at least 95%, at least 98%, at least 99%, or 100% identical to SEQ ID NO: 34, and the target nucleic acid comprises a PAM sequence of GTTA (SEQ ID NO: 162). In some instances, the effector protein comprises an amino acid sequence that is at least 70%, at least 75%, at least 80%, at least 85%, at least 90%, at least 95%, at least 98%, at least 99%, or 100% identical to SEQ ID NO: 34, and the target nucleic acid comprises a PAM sequence of GTTG (SEQ ID NO: 163).

[0933] In some instances, the effector protein comprises an amino acid sequence that is at least 70%, at least 75%, at least 80%, at least 85%, at least 90%, at least 95%, at least 98%, at least 99%, or 100% identical to SEQ ID NO: 44, and the target nucleic acid comprises a PAM sequence of TTC (SEQ ID NO: 167).

[0934] In some instances, the effector protein comprises an amino acid sequence that is at least 70%, at least 75%, at least 80%, at least 85%, at least 90%, at least 95%, at least 98%, at least 99%, or 100% identical to SEQ ID NO: 45, and the target nucleic acid comprises a PAM sequence of TTT (SEQ ID NO: 168). In some instances, the effector protein comprises an amino acid sequence that is at least 70%, at least 75%, at least 80%, at least 85%, at least 90%, at least 95%, at least 98%, at least 99%, or 100% identical to SEQ ID NO: 45, and the target nucleic acid comprises a PAM sequence of TTC (SEQ ID NO: 167).

[0935] In some instances, the effector protein comprises an amino acid sequence that is at least 70%, at least 75%, at least 80%, at least 85%, at least 90%, at least 95%, at least 98%, at least 99%, or 100% identical to SEQ ID NO: 18, and the target nucleic acid comprises a PAM sequence of CC (SEQ ID NO: 155). In some instances, the effector protein comprises an amino acid sequence that is at least 70%, at least 75%, at least 80%, at least 85%, at least 90%, at least 95%, at least 98%, at least 99%, or 100% identical to SEQ ID NO: 19, and the target nucleic acid comprises a PAM sequence of CC (SEQ ID NO: 155).

[0936] In some instances, the effector protein comprises an amino acid sequence that is at least 70%, at least 75%, at least 80%, at least 85%, at least 90%, at least 95%, at least 98%, at least 99%, or 100% identical to SEQ ID NO: 43, and the target nucleic acid comprises a PAM sequence of TTC (SEQ ID NO: 167).

[0937] In some cases, the target nucleic acid comprises 5 to 100, 5 to 90, 5 to 80, 5 to 70, 5 to 60, 5 to 50, 5 to 40, 5 to 30, 5 to 25, 5 to 20, 5 to 15, or 5 to 10 linked nucleosides. In some cases, the target nucleic acid comprises 10 to 90, 20 to 80, 30 to 70, or 40 to 60 linked nucleosides. In some cases, the target nucleic acid comprises 5, 6, 7, 8, 9, 10, 11, 12, 13, 14, 15, 16, 17, 18, 19, 20, 21, 22, 23, 24, 25, 26, 27, 28, 29, 30, 31, 32, 33, 34, 35, 36, 37, 38, 39, 40, 45, 50, 60, 70, 80, 90, or 100 linked nucleosides. In some instances, the target nucleic acid comprises at least 10, at least 20, at least 30, at least 40, at least 50, at least 60, at least 70, at least 80, at least 90, or at least 100 linked nucleosides.

[0938] In some cases, the target nucleic acid is AAVS1, ABCA4, ABCB11, ABCC8, ABCD1, ACAD9, ACADM, ACADVL, ACAT1, ACOX1, ACSF3, ADA, ADAMTS2, ADGRG1, AGA, AGL, AGPS, AGXT, AHI1, AIRE, ALDH3A2, ALDOB, ALG6, ALK, ALKBH5, ALMS1, ALPL, AMRC9, AMT, ANGPTL3, APC, Apo(a), APOCIII, APOEε4, APOL1, APP, AQP2, AR, ARFRP1, ARG1, ARL13B, ARL6, ARSA, ARSB, ASL, ASNS, ASPA, ASS1, ATM, ATP6V1B1, ATP7A, ATP7B, ATRX, ATXN1, ATXN10, ATXN2, ATXN3, ATXN7, ATXN8OS, AXIN1, AXIN2, B2M, BACE-1, BAK1, BAP1, BARD1, BAX2, BBS1, BBS10, BBS12, BBS2, BCKDHA, BCKDHB, BCL2L2, BCS1L, BEST1, Betaglobin gene, BLM, BMPR1A, BRAFV600E, BRCA1, BRCA2, BRIP1, BSND, C282Y, C9orf72, CA4, CACNA1A, CAPN3, CASR, CBS, CC2D2A, CCR5, CDC73, CDH1, CDH23, CDK11, CDK4, CDKN1B, CDKN1C, CDKN2A, CEBPA, CEP290, CERKL, CFTR, CHCHD10, CHEK2, CHM, CHRNE, CIITA, CLN3, CLN5, CLN6, CLN8, CLRN1, CLTA, CNBP, CNGB1, CNGB3, COL1A1, COL1A2, COL27A1, COL4A3, COL4A4, COL4A5, COL7A1, CPS1, CPT1A, CPT2, CRB1, CRX, CTNNA1, CTNNB1, CTNND2, CTNS, CTSK, CYBA, CYBB, CYP11B1, CYP11B2, CYP17A1, CYP19A1, CYP27A1, DBT, DCLRE1C, DERL2, DFNA36, DFNB31, DGAT2, DHCR7, DHDDS, DICER1, DIS3L2, DLD, DMD, DMPK, DNAH5, DNAI1, DNAI2, DNM2, DNMT1, DYSF, EDA, EDN3, EDNRB, EGFR, EIF2B5, EMC2, EMC3, EMD, EMX1, EPCAM, ERCC6, ERCC8, ESCO2, ETFA, ETFDH, ETHE1, EVC, EVC2, EYS, F5, F9, FactorB, FactorXI, FAH, FAM161A, FANCA, FANCB, FANCC, FANCD1, FANCD2, FANCE, FANCF, FANCG, FANCI, FANCJ, FANCL, FANCM, FANCN, FANCP, FANCS, FBN1, FGF14, FGFR2, FGFR3, FH, FHL1, FKRP, FKTN, FLCN, FMR1, FOXP3, FSCN2, FUS, FUT8, FVIII, FXII, FXN, G6PC, GAA, GALC, GALK1, GALT, GAMT, GATA2, GBA, GBE1, GCDH, GCGR, GDNF, GFAP, GFM1, GHR, GJB1, GJB2, GLA, GLB1, GLDC, GLE1, GNE, GNPTAB, GNPTG, GNS, GPC3, GPR98, GREM1, GRHPR, GRIN2B, H2AX, HADHA, HAX1, HBA1, HBA2, HBB, HEXA, HEXB, HGSNAT, HLCS, HMGCL, HOGA1, HOXB13, HPRPF3, HPRT1, HPS1, HPS3, HRAS, HSD17B4, HSD3B2, HTT, HYAL1, HYLS1, IDS, IDUA, IFITM5, IKBKAP, IL2RG, IMPDH1, INPP5E, IRF4, ITPR1, IVD, JAG1, KCNC3, KCND3, KCNJ11, KLHL7, KRAS, LAMA2, LAMA3, LAMB3, LAMC2, LCA5, LDLR, LDLRAP1, LHX3, LIFR, LIPA, LMNA, LOXHD1, LPL, LRAT, LRP6, LRPPRC, LRRK2, MAN2B1, MAPT, MAX, MCOLN1, MECP2, MED17, MEFV, MEN1, MERTK, MESP2, MET, METex14, MFN2, MFSD8, MITF, MKS1, MLC1, MLH1, MLH3, MMAA, MMAB, MMACHC, MMADHC, MMD, MPI, MPL, MPV17, MSH2, MSH3, MSH6, MTHFR, MTM1, MTRR, MTTP, MUT, MUTYH, MYO7A, NAGLU, NAGS, NBN, NDRG1, NDUFAF5, NDUFS6, NEB, NF1, NF2, NOTCH2, NPC1, NPC2, NPHP1, NPHS1, NPHS2, NR2E3, NTHL1, NTRK, NTRK1, OAT, OCT4, OFD1, OPA3, OTC, PAH, PALB2, PAQR8, PAX3, PC, PCCA, PCCB, PCDH15, PCSK9, PD1, PDCD1, PDE6B, PDGFRA, PDHA1, PDHB, PEX1, PEX10, PEX12, PEX13, PEX14, PEX16, PEX19, PEX2, PEX26, PEX3, PEX5, PEX6, PEX7, PFKM, PHGDH, PHOX2B, PKD1, PKD2, PKHD1, PKK, PLEKHG4, PMM2, PMP22, PMS1, PMS2, PNPLA3, POLD1, POLE, POMGNT1, POT1, POU5F1, PPM1A, PPP2R2B, PPT1, PRCD, PRKAR1A, PRKCG, PRNP, PROM1, PROP1, PRPF31, PRPF8, PRPH2, PRPS1, PSAP, PSD95, PSEN1, PSEN2, PTCH1, PTEN, PTS, PUS1, PYGM, RAB23, RAD50, RAD51C, RAD51D, RAG2, RAPSN, RARS2, RB1, RDH12, RECQL4, RET, RHO, RICTOR, RMRP, ROS1, RP1, RP2, RPE65, RPGR, RPGRIP1L, RPL32P3, RS1, RTEL1, RUNX1, SACS, SAMHD1, SCN1A, SCN2A, SDHA, SDHAF2, SDHB, SDHC, SDHD, SEL1L, SEPSECS, SERPING1, SGCA, SGCB, SGCG, SGSH, SIRT1, SLC12A3, SLC12A6, SLC17A5, SLC22A5, SLC25A13, SLC25A15, SLC26A2, SLC26A4, SLC35A3, SLC37A4, SLC39A4, SLC4A11, SLC6A8, SLC7A7, SMAD4, SMARCA4, SMARCAL1, SMARCB1, SMARCE1, SMN1, SMPD1, SNAI2, SNCA, SNRNP200, SOD1, SOX10, SPARA7, SPTBN2, STAR, STAT3, STK11, SUFU, SUMF1, SYNE1, SYNE2, SYS1, TARDBP, TAT, TBK1, TBP, TCIRG1, TCTN3, TECPR2, TERC, TERT, TFR2, TGFBR2, TGM1, TH, TLE3, TMEM127, TMEM138, TMEM216, TMEM43, TMEM67, TMPRSS6, TOP1, TOPORS, TP53, TPP1, TRAC, TRMU, TSFM, TSPAN14, TTBK2, TTC8, TTPA, TTR, TULP1, TYMP, UBE2G2, UBE2J1, UBE3A, USH1C, USH1G, USH2A, VEGF, VHL, VPS13A, VPS13B, VPS35, VPS45, VRK1, VSX2, VWF, WDR19, WNT10A, WS2B, WS2C, XPA, XPC, XPF, YAP1, ZFYVE26, or ZNF423.

[0939] In some cases, the target nucleic acid is selected from the target nucleic acids listed in Table 4.

TABLE 4
EXEMPLARY TARGET NUCLEIC ACIDS
Exemplary target nucleic acids

DNMT1, HPRT1, RPL32P3, CCR5, FANCF, GRIN2B, EMX1
AAVS1, ALKBH5, CLTA, CDK11,
CTNNB1, AXIN1, LRP6, TBK1, BAP1, TLE3, PPM1A, BCL2L2, SUFU,
RICTOR, VPS35, TOP1, SIRT1, PTEN
MMD, PAQR8,
H2AX, POU5F1, OCT4
B2M, TRAC, or CIITA, or NGCG_B2M
SYS1, ARFRP1, and TSPAN14
EMC2, EMC3, SEL1L, DERL2, UBE2G2, UBE2J1, and HRD1

[0940] In some cases, the target nucleic acid comprises a target locus. In certain embodiments, the target nucleic acid comprises more than one target loci.

[0941] In some cases, the target nucleic acid is B2M. In some cases, the B2M target nucleic acid comprises one or more target loci. In some cases, the B2M target nucleic acid comprises two target loci. In some cases, the B2M target locus comprises B2M2 or B2M4.

[0942] In some cases, the target nucleic acid is B2M, IRAC, or CIITA, NGCG_B2M, or any combination thereof. In some cases, the B2M, IRAC, or CIITA, or NGCG_B2M target nucleic acid comprises one or more target loci. In some cases, the B2M, IRAC, or CIITA, or NGCG_B2M target nucleic acid comprises two target loci.

[0943] A D2S effector protein-guide nucleic acid complex may comprise high selectivity for a target sequence. In some cases, a ribonucleoprotein may comprise a selectivity of at least 200:1, 100:1, 50:1, 20:1, 10:1, or 5:1 for a target nucleic acid over a single nucleotide variant of the target nucleic acid. In some cases, a ribonucleoprotein may comprise a selectivity of at least 5:1 for a target nucleic acid over a single nucleotide variant of the target nucleic acid. Leveraging D2S effector protein selectivity, some methods described herein may detect a target nucleic acid present in the sample in various concentrations or amounts as a target nucleic acid population. In some cases, the sample has at least 2 target nucleic acids. In some cases, the sample has at least 3, 5, 10, 20, 30, 40, 50, 100, 200, 300, 400, 500, 600, 700, 800, 900, 1000, 2000, 3000, 4000, 5000, 6000, 7000, 8000, 9000, or 10000 target nucleic acids. In some cases, the sample comprises 1 to 10,000, 100 to 8000, 400 to 6000, 500 to 5000, 1000 to 4000, or 2000 to 3000 target nucleic acids. In some cases, the method detects target nucleic acid present at least at one copy per 10 non-target nucleic acids, 10² non-target nucleic acids, 10³ non-target nucleic acids, 10⁴ non-target nucleic acids, 10⁵ non-target nucleic acids, 10⁶ non-target nucleic acids, 10⁷ non-target nucleic acids, 10⁸ non-target nucleic acids, 10⁹ non-target nucleic acids, or 10¹⁰ non-target nucleic acids.

[0944] Often, the target nucleic acid may be from 0.05% to 20% of total nucleic acids in the sample. Sometimes, the target nucleic acid is 0.1% to 10% of the total nucleic acids in the sample. The target nucleic acid, in some cases, is 0.1% to 5% of the total nucleic acids in the sample. The target nucleic acid may also be 0.1% to 1% of the total nucleic acids in the sample. The target nucleic acid may be DNA or RNA. The target nucleic acid may be any amount less than 100% of the total nucleic acids in the sample. The target nucleic acid may be 100% of the total nucleic acids in the sample.

[0945] The target nucleic acid may be 0.05% to 20% of total nucleic acids in the sample. Sometimes, the target nucleic acid is 0.1% to 10% of the total nucleic acids in the sample. The target nucleic acid, in some cases, is 0.1% to 5% of the total nucleic acids in the sample. Often, a sample comprises the segment of the target nucleic acid and at least one nucleic acid comprising less than 100% sequence identity to the segment of the target nucleic acid but no less than 50% sequence identity to the segment of the target nucleic acid. For example, the segment of the target nucleic acid comprises a mutation as compared to at least one nucleic acid comprising less than 100% sequence identity to the segment of the target nucleic acid but no less than 50% sequence identity to the segment of the target nucleic acid. Often, the segment of the target nucleic acid comprises a single nucleotide mutation as compared to at least one nucleic acid comprising less than 100% sequence identity to the segment of the target nucleic acid but no less than 50% sequence identity to the segment of the target nucleic acid.

[0946] A target nucleic acid may be an amplified nucleic acid of interest. The nucleic acid of interest may be any nucleic acid disclosed herein or from any sample as disclosed herein. The nucleic acid of interest may be an RNA that is reverse transcribed before amplification. The nucleic acid of interest may be amplified then the amplicons may be transcribed into RNA.

[0947] In some instances, compositions described herein exhibit indiscriminate trans-cleavage of ssRNA, enabling their use for detection of RNA in samples. In some cases, target ssRNA are generated from many nucleic acid templates (RNA) in order to achieve cleavage of the FQ reporter in the DETECTR platform. Certain D2S effector proteins may be activated by ssRNA, upon which they may exhibit trans-cleavage of ssRNA and may, thereby, be used to cleave ssRNA FQ reporter molecules in the DETECTR system. These D2S effector proteins may target ssRNA present in the sample or ssRNA generated and/or amplified from any number of nucleic acid templates (RNA). Described herein are reagents comprising a single stranded reporter nucleic acid comprising a detection moiety, wherein the reporter nucleic acid (e.g., the ssDNA-FQ reporter described above) is capable of being cleaved by the D2S effector protein, upon generation and amplification of ssRNA from a nucleic acid template using the methods disclosed herein, thereby generating a first detectable signal.

[0948] In some instances, target nucleic acids comprise at least one nucleic acid comprising at least 50% sequence identity to the target nucleic acid or a portion thereof. Sometimes, the at least one nucleic acid comprises an amino acid sequence that is at least 60%, 70%, 75%, 80%, 85%, 90%, 91%, 92%, 93%, 94%, 95%, 96%, 97%, 98%, or 99% identical to an equal length portion of the target nucleic acid. Sometimes, the at least one nucleic acid comprises an amino acid sequence that is 100% identical to an equal length portion of the target nucleic acid. Sometimes, the amino acid sequence of the at least one nucleic acid is at least 60%, 70%, 75%, 80%, 85%, 90%, 91%, 92%, 93%, 94%, 95%, 96%, 97%, 98%, or 99% identical to the target nucleic acid. Sometimes, the target nucleic acid comprises an amino acid sequence that is less than 60%, 70%, 75%, 80%, 85%, 90%, 91%, 92%, 93%, 94%, 95%, 96%, 97%, 98%, or 99% identical to an equal length portion of the at least one nucleic acid.

[0949] In some instances, samples comprise a target nucleic acid at a concentration of less than 1 nM, less than 2 nM, less than 3 nM, less than 4 nM, less than 5 nM, less than 6 nM, less than 7 nM, less than 8 nM, less than 9 nM, less than 10 nM, less than 20 nM, less than 30 nM, less than 40 nM, less than 50 nM, less than 60 nM, less than 70 nM, less than 80 nM, less than 90 nM, less than 100 nM, less than 200 nM, less than 300 nM, less than 400 nM, less than 500 nM, less than 600 nM, less than 700 nM, less than 800 nM, less than 900 nM, less than 1 μM, less than 2 μM, less than 3 μM, less than 4 μM, less than 5 μM, less than 6 μM, less than 7 μM, less than 8 μM, less than 9 μM, less than 10 μM, less than 100 μM, or less than 1 mM. In some instances, the sample comprises a target nucleic acid sequence at a concentration of 1 nM to 2 nM, 2 nM to 3 nM, 3 nM to 4 nM, 4 nM to 5 nM, 5 nM to 6 nM, 6 nM to 7 nM, 7 nM to 8 nM, 8 nM to 9 nM, 9 nM to 10 nM, 10 nM to 20 nM, 20 nM to 30 nM, 30 nM to 40 nM, 40 nM to 50 nM, 50 nM to 60 nM, 60 nM to 70 nM, 70 nM to 80 nM, 80 nM to 90 nM, 90 nM to 100 nM, 100 nM to 200 nM, 200 nM to 300 nM, 300 nM to 400 nM, 400 nM to 500 nM, 500 nM to 600 nM, 600 nM to 700 nM, 700 nM to 800 nM, 800 nM to 900 nM, 900 nM to 1 μM, 1 μM to 2 μM, 2 μM to 3 μM, 3 μM to 4 μM, 4 μM to 5 μM, 5 μM to 6 μM, 6 μM to 7 μM, 7 μM to 8 μM, 8 μM to 9 μM, 9 μM to 10 μM, 10 μM to 100 μM, 100 μM to 1 mM, 1 nM to 10 nM, 1 nM to 100 nM, 1 nM to 1 μM, 1 nM to 10 μM, 1 nM to 100 μM, 1 nM to 1 mM, 10 nM to 100 nM, 10 nM to 1 μM, 10 nM to 10 μM, 10 nM to 100 μM, 10 nM to 1 mM, 100 nM to 1 μM, 100 nM to 10 μM, 100 nM to 100 μM, 100 nM to 1 mM, 1 μM to 10 μM, 1 μM to 100 μM, 1 μM to 1 mM, 10 μM to 100 μM, 10 μM to 1 mM, or 100 μM to 1 mM. In some instances, the sample comprises a target nucleic acid at a concentration of 20 nM to 200 μM, 50 nM to 100 μM, 200 nM to 50 μM, 500 nM to 20 μM, or 2 μM to 10 μM. In some instances, the target nucleic acid is not present in the sample.

[0950] In some instances, samples comprise fewer than 10 copies, fewer than 100 copies, fewer than 1000 copies, fewer than 10,000 copies, fewer than 100,000 copies, or fewer than 1,000,000 copies of a target nucleic acid sequence. In some instances, the sample comprises 10 copies to 100 copies, 100 copies to 1000 copies, 1000 copies to 10,000 copies, 10,000 copies to 100,000 copies, 100,000 copies to 1,000,000 copies, 10 copies to 1000 copies, 10 copies to 10,000 copies, 10 copies to 100,000 copies, 10 copies to 1,000,000 copies, 100 copies to 10,000 copies, 100 copies to 100,000 copies, 100 copies to 1,000,000 copies, 1,000 copies to 100,000 copies, or 1,000 copies to 1,000,000 copies of a target nucleic acid sequence. In some instances, the sample comprises 10 copies to 500,000 copies, 200 copies to 200,000 copies, 500 copies to 100,000 copies, 1000 copies to 50,000 copies, 2000 copies to 20,000 copies, 3000 copies to 10,000 copies, or 4000 copies to 8000 copies. In some instances, the target nucleic acid is not present in the sample.

[0951] A number of target nucleic acid populations are consistent with the methods and compositions disclosed herein. Some methods described herein may detect two or more target nucleic acid populations present in the sample in various concentrations or amounts. In some cases, the sample has at least 2 target nucleic acid populations. In some cases, the sample has at least 3, 4, 5, 6, 7, 8, 9, 10, 20, 30, 40, or 50 target nucleic acid populations. In some cases, the sample has 3 to 50, 5 to 40, or 10 to 25 target nucleic acid populations. In some cases, the method detects target nucleic acid populations that are present at least at one copy per 10¹ non-target nucleic acids, 10² non-target nucleic acids, 10³ non-target nucleic acids, 10⁴ non-target nucleic acids, 10⁵ non-target nucleic acids, 10⁶ non-target nucleic acids, 10⁷ non-target nucleic acids, 10⁸ non-target nucleic acids, 10⁹ non-target nucleic acids, or 10¹⁰ non-target nucleic acids. The target nucleic acid populations may be present at different concentrations or amounts in the sample.

[0952] In some instances, target nucleic acids may activate a D2S effector protein to initiate sequence-independent cleavage of a nucleic acid-based reporter (e.g., a reporter comprising an RNA sequence, or a reporter comprising DNA and RNA). For example, a D2S effector protein of the present disclosure is activated by a target nucleic acid to cleave reporters having an RNA (also referred to herein as an “RNA reporter”). Alternatively, a D2S effector protein of the present disclosure is activated by a target nucleic acid to cleave reporters having an RNA. Alternatively, a D2S effector protein of the present disclosure is activated by a target RNA to cleave reporters having an RNA (also referred to herein as a “RNA reporter”). The RNA reporter may comprise a single-stranded RNA labelled with a detection moiety or may be any RNA reporter as disclosed herein.

[0953] In some instances, the target nucleic acid as described in the methods herein does not initially comprise a PAM sequence. However, any target nucleic acid of interest may be generated using the methods described herein to comprise a PAM sequence, and thus be a PAM target nucleic acid. A PAM target nucleic acid, as used herein, refers to a target nucleic acid that has been amplified to insert a PAM sequence that is recognized by a D2S effector system.

[0954] In some instances, the target nucleic acid is in a cell. In some instances, the cell is a single-cell eukaryotic organism; a plant cell an algal cell; a fungal cell; an animal cell; a cell an invertebrate animal; a cell a vertebrate animal such as fish, amphibian, reptile, bird, and mammal; or a cell a mammal such as a human, a non-human primate, an ungulate, a feline, a bovine, an ovine, and a caprine. In preferred embodiments, the cell is a eukaryotic cell. In preferred embodiments, the cell is a mammalian cell, a human cell, or a plant cell.

[0955] In some instances, the target nucleic acid comprises a nucleic acid sequence from a pathogen responsible for a disease. Non-limiting examples of pathogens are bacteria, a virus and a fungus. The target nucleic acid, in some cases, is a portion of a nucleic acid from a sexually transmitted infection or a contagious disease. In some cases, the target nucleic acid is a portion of a nucleic acid from a genomic locus, or any DNA amplicon, such as a reverse transcribed mRNA or a cDNA from a gene locus, a transcribed mRNA, or a reverse transcribed cDNA from a gene locus in at least one of: human immunodeficiency virus (HIV), human papillomavirus (HPV), chlamydia, gonorrhea, syphilis, trichomoniasis, sexually transmitted infection, malaria, Dengue fever, Ebola, chikungunya, and leishmaniasis. Pathogens include viruses, fungi, helminths, protozoa, malarial parasites, Plasmodium parasites, Toxoplasma parasites, and Schistosoma parasites. Helminths include roundworms, heartworms, and phytophagous nematodes, flukes, Acanthocephala, and tapeworms. Protozoan infections include infections from Giardia spp., Trichomonas spp., African trypanosomiasis, amoebic dysentery, babesiosis, balantidial dysentery, Chaga's disease, coccidiosis, malaria and toxoplasmosis. Examples of pathogens such as parasitic/protozoan pathogens include, but are not limited to: Plasmodium falciparum, P. vivax, Trypanosoma cruzi and Toxoplasma gondii. Fungal pathogens include, but are not limited to Cryptococcus neoformans, Histoplasma capsulatum, Coccidioides immitis, Blastomyces dermatitidis, Chlamydia trachomatis, and Candida albicans. Pathogenic viruses include but are not limited to coronavirus (e.g., SARS-CoV-2); immunodeficiency virus (e.g., HIV); influenza virus; dengue; West Nile virus; herpes virus; yellow fever virus; Hepatitis Virus C; Hepatitis Virus A; Hepatitis Virus B; papillomavirus; and the like. Pathogens include, e.g., HIV virus, Mycobacterium tuberculosis, Streptococcus agalactiae, methicillin-resistant Staphylococcus aureus, Legionella pneumophila, Streptococcus pyogenes, Escherichia coli, Neisseria gonorrhoeae, Neisseria meningitidis, Pneumococcus, Cryptococcus neoformans, Histoplasma capsulatum, Hemophilus influenzae B, Treponema pallidum, Lyme disease spirochetes, Pseudomonas aeruginosa, Mycobacterium leprae, Brucella abortus, rabies virus, influenza virus, cytomegalovirus, herpes simplex virus I, herpes simplex virus II, human serum parvo-like virus, respiratory syncytial virus (RSV), M. genitalium, T vaginalis, varicella-zoster virus, hepatitis B virus, hepatitis C virus, measles virus, adenovirus, human T-cell leukemia viruses, Epstein-Barr virus, murine leukemia virus, mumps virus, vesicular stomatitis virus, Sindbis virus, lymphocytic choriomeningitis virus, wart virus, blue tongue virus, Sendai virus, feline leukemia virus, Reovirus, polio virus, simian virus 40, mouse mammary tumor virus, dengue virus, rubella virus, West Nile virus, Plasmodium falciparum, Plasmodium vivax, Toxoplasma gondii, Trypanosoma rangeli, Trypanosoma cruzi, Trypanosoma rhodesiense, Trypanosoma brucei, Schistosoma mansoni, Schistosoma japonicum, Babesia bovis, Eimeria tenella, Onchocerca volvulus, Leishmania tropica, Mycobacterium tuberculosis, Trichinella spiralis, Theileria parva, Taenia hydatigena, Taenia ovis, Taenia saginata, Echinococcus granulosus, Mesocestoides corti, Mycoplasma arthritidis, M. hyorhinis, M. orale, M. arginini, Acholeplasma laidlawii, M. salivarium and M. pneumoniae. In some cases, the target sequence is a portion of a nucleic acid from a genomic locus, a transcribed mRNA, or a reverse transcribed cDNA from a gene locus of bacterium or other agents responsible for a disease in the sample comprising a mutation that confers resistance to a treatment, such as a single nucleotide mutation that confers resistance to antibiotic treatment.

[0956] In some embodiments, compositions, systems, and methods described herein comprise a modified target nucleic acid which can describe a target nucleic acid wherein the target nucleic acid has undergone a modification, for example, after contact with an effector protein. In some cases, the modification is an alteration in the sequence of the target nucleic acid. In some cases, the modified target nucleic acid comprises an insertion, deletion, or replacement of one or more nucleotides compared to the unmodified target nucleic acid.

[0957] In some instances, the target nucleic acid sequence comprises a nucleic acid sequence of a virus, a bacterium, or other pathogen responsible for a disease in a plant (e.g., a crop). Methods and compositions of the disclosure may be used to treat or detect a disease in a plant. For example, the methods of the disclosure may be used to target a viral nucleic acid sequence in a plant. A D2S effector protein of the disclosure (e.g., Cas14) may cleave the viral nucleic acid. In some instances, the target nucleic acid sequence comprises a nucleic acid sequence of a virus or a bacterium or other agents (e.g., any pathogen) responsible for a disease in the plant (e.g., a crop). In some instances, the target nucleic acid comprises RNA. The target nucleic acid, in some cases, is a portion of a nucleic acid from a virus or a bacterium or other agents responsible for a disease in the plant (e.g., a crop). In some cases, the target nucleic acid is a portion of a nucleic acid from a genomic locus, or any NA amplicon, such as a reverse transcribed mRNA or a cDNA from a gene locus, a transcribed mRNA, or a reverse transcribed cDNA from a gene locus in at a virus or a bacterium or other agents (e.g., any pathogen) responsible for a disease in the plant (e.g., a crop). A virus infecting the plant may be an RNA virus. A virus infecting the plant may be a DNA virus. Non-limiting examples of viruses that may be targeted with the disclosure include Tobacco mosaic virus (TMV), Tomato spotted wilt virus (TSWV), Cucumber mosaic virus (CMV), Potato virus Y (PVY), Cauliflower mosaic virus (CaMV) (RT virus), Plum pox virus (PPV), Brome mosaic virus (BMV) and Potato virus X (PVX).

### Mutations

[0958] In some instances, target nucleic acids comprise a mutation. In some embodiments, a composition, system or method described herein can be used to modify a target nucleic acid comprising a mutation such that the mutation is modified to be a wild-type nucleotide or nucleotide sequence. In some embodiments, a composition, system or method described herein can be used to detect a target nucleic acid comprising a mutation. In some instances, a sequence comprising a mutation may be modified to a wildtype sequence with a composition, system or method described herein. In some instances, a sequence comprising a mutation may be detected with a composition, system or method described herein. The mutation may be a mutation of 1, 2, 3, 4, 5, 6, 7, 8, 9, 10, 11, 12, 13, 14, 15, 16, 17, 18, 19, 20 or more nucleotides. The mutation may comprise a deletion of about 5, about 10, about 15, about 20, about 25, about 30, about 35, about 40, about 45, about 50, about 55, about 60, about 65, about 70, about 75, about 80, about 85, about 90, about 95, about 100, about 200, about 300, about 400, about 500, about 600, about 700, about 800, about 900, or about 1000 nucleotides. The mutation may comprise a deletion of 1 to 5, 5 to 10, 10 to 15, 15 to 20, 20 to 25, 25 to 30, 30 to 35, 35 to 40, 40 to 45, 45 to 50, 50 to 55, 55 to 60, 60 to 65, 65 to 70, 70 to 75, 75 to 80, 80 to 85, 85 to 90, 90 to 95, 95 to 100, 100 to 200, 200 to 300, 300 to 400, 400 to 500, 500 to 600, 600 to 700, 700 to 800, 800 to 900, 900 to 1000, 1 to 50, 1 to 100, 25 to 50, 25 to 100, 50 to 100, 100 to 500, 100 to 1000, or 500 to 1000 nucleotides. Non-limiting examples of mutations are insertion-deletion (indel), single nucleotide polymorphism (SNP), and frameshift mutations. In some instances, guide nucleic acids described herein hybridize to a region of the target nucleic acid comprising the mutation. The mutation may be located in a non-coding region or a coding region of a gene.

[0959] A mutation may be in an open reading frame of a target nucleic acid. A mutation may result in the insertion of at least one amino acid in a protein encoded by the target nucleic acid. A mutation may result in the deletion of at least one amino acid in a protein encoded by the target nucleic acid. A mutation may result in the substitution of at least one amino acid in a protein encoded by the target nucleic acid. A mutation that results in the deletion, insertion, or substitution of one or more amino acids of a protein encoded by the target nucleic acid may result in misfolding of a protein encoded by the target nucleic acid. A mutation may result in a premature stop codon, thereby resulting in a truncation of the encoded protein.

[0960] In some embodiments, a mutation comprises a point mutation or single nucleotide polymorphism (SNP), a chromosomal mutation, a copy number mutation, or any combination thereof. A point mutation optionally comprises a substitution, insertion, or deletion. In some embodiments, a mutation comprises a chromosomal mutation. A chromosomal mutations can comprise an inversion, a deletion, a duplication, or a translocation of one or more nucleotides. In some embodiments, a mutation comprises a copy number variation. A copy number variation can comprise a gene amplification or an expanding trinucleotide repeat. In some embodiments, guide nucleic acids described herein hybridize to a target sequence of a target nucleic acid comprising the mutation. In some embodiments, mutations are located in a non-coding region of a gene.

[0961] In some instances, target nucleic acids comprise a mutation, wherein the mutation is a SNP. The single nucleotide mutation or SNP may be associated with a phenotype of the sample or a phenotype of the organism from which the sample was taken. The SNP, in some cases, is associated with altered phenotype from wild type phenotype. In some embodiments, a single nucleotide mutation, SNP, or deletion described herein is associated with a disease, such as a genetic disease. The SNP may be a synonymous substitution or a nonsynonymous substitution. The nonsynonymous substitution may be a missense substitution or a nonsense point mutation. The synonymous substitution may be a silent substitution. The mutation may be a deletion of one or more nucleotides. Often, the single nucleotide mutation, SNP, or deletion is associated with a disease such as cancer or a genetic disorder. The mutation, such as a single nucleotide mutation, a SNP, or a deletion, may be encoded in the sequence of a target nucleic acid from the germline of an organism or may be encoded in a target nucleic acid from a diseased cell, such as a cancer cell.

[0962] In some embodiments, the target nucleic acid comprises a mutation associated with a disease. In some examples, a mutation associated with a disease refers to a mutation whose presence in a subject indicates that the subject is susceptible to or suffers from, a disease, disorder, condition, or syndrome. In some examples, a mutation associated with a disease refers to a mutation which causes, contributes to the development of, or indicates the existence of the disease, disorder, condition, or syndrome. A mutation associated with a disease may also refer to any mutation which generates transcription or translation products at an abnormal level, or in an abnormal form, in cells affected by a disease relative to a control without the disease. In some examples, a mutation associated with a disease refers to a mutation whose presence in a subject indicates that the subject is susceptible to, or suffers from, a disease, disorder, or pathological state. In some embodiments, a mutation associated with a disease, comprises the co-occurrence of a mutation and the phenotype of a disease. The mutation may occur in a gene, wherein transcription or translation products from the gene occur at a significantly abnormal level or in an abnormal form in a cell or subject harboring the mutation as compared to a non-disease control subject not having the mutation.

[0963] In some instances, target nucleic acids comprise a mutation, wherein the mutation is a deletion of 1, 2, 3, 4, 5, 6, 7, 8, 9, 10, 11, 12, 13, 14, 15, 16, 17, 18, 19, 20 or more nucleotides. In some embodiments, a target nucleic acid comprises a mutation of 1, 2, 3, 4, 5, 6, 7, 8, 9, 10, 11, 12, 13, 14, 15, 16, 17, 18, 19, 20 or more nucleotides. The mutation may be a deletion of about 5, about 10, about 15, about 20, about 25, about 30, about 35, about 40, about 45, about 50, about 55, about 60, about 65, about 70, about 75, about 80, about 85, about 90, about 95, about 100, about 200, about 300, about 400, about 500, about 600, about 700, about 800, about 900, or about 1000 nucleotides. The mutation may be a deletion of 1 to 5, 5 to 10, 10 to 15, 15 to 20, 20 to 25, 25 to 30, 30 to 35, 35 to 40, 40 to 45, 45 to 50, 50 to 55, 55 to 60, 60 to 65, 65 to 70, 70 to 75, 75 to 80, 80 to 85, 85 to 90, 90 to 95, 95 to 100, 100 to 200, 200 to 300, 300 to 400, 400 to 500, 500 to 600, 600 to 700, 700 to 800, 800 to 900, 900 to 1000, 1 to 50, 1 to 100, 25 to 50, 25 to 100, 50 to 100, 100 to 500, 100 to 1000, or 500 to 1000 nucleotides.

### Certain Samples

[0964] Various sample types comprising a target nucleic acid of interest are consistent with the present disclosure. These samples may comprise a target nucleic acid sequence for detection. In some instances, the detection of the target nucleic indicates an ailment, such as a disease, cancer, or genetic disorder, or genetic information, such as for phenotyping, genotyping, or determining ancestry and are compatible with the reagents and support mediums as described herein. Generally, a sample from an individual or an animal or an environmental sample may be obtained to test for presence of a disease, cancer, genetic disorder, or any mutation of interest.

[0965] In some instances, the sample is a biological sample, an environmental sample, or a combination thereof. Non-limiting examples of biological samples are blood, serum, plasma, saliva, urine, mucosal sample, peritoneal sample, cerebrospinal fluid, gastric secretions, nasal secretions, sputum, pharyngeal exudates, urethral or vaginal secretions, an exudate, an effusion, and a tissue sample (e.g., a biopsy sample). A tissue sample from a subject may be dissociated or liquified prior to application to detection system of the present disclosure. Non-limiting examples of environmental samples are soil, air, or water. In some instances, an environmental sample is taken as a swab from a surface of interest or taken directly from the surface of interest.

[0966] In some instances, the sample is a raw (unprocessed, unmodified) sample. Raw samples may be applied to a system for detecting or modifying a target nucleic acid, such as those described herein. In some instances, the sample is diluted with a buffer or a fluid or concentrated prior to its application to the system or be applied neat to the detection system. Sometimes, the sample contains no more 20 μl of buffer or fluid. The sample, in some cases, is contained in no more than 1, 5, 10, 15, 20, 25, 30, 35 40, 45, 50, 55, 60, 65, 70, 75, 80, 90, 100, 200, 300, 400, 500 μl, or any of value 1 μl to 500 μl, preferably 10 μL to 200 μL, or more preferably 50 μL to 100 μL of buffer or fluid. Sometimes, the sample is contained in more than 500 μl.

[0967] In some instances, the sample is taken from a single-cell eukaryotic organism; a plant or a plant cell; an algal cell; a fungal cell; an animal cell, tissue, or organ; a cell, tissue, or organ from an invertebrate animal; a cell, tissue, fluid, or organ from a vertebrate animal such as fish, amphibian, reptile, bird, and mammal; a cell, tissue, fluid, or organ from a mammal such as a human, a non-human primate, an ungulate, a feline, a bovine, an ovine, and a caprine. In some instances, the sample is taken from nematodes, protozoans, helminths, or malarial parasites. In some cases, the sample comprises nucleic acids from a cell lysate from a eukaryotic cell, a mammalian cell, a human cell, a prokaryotic cell, or a plant cell. In some cases, the sample comprises nucleic acids expressed from a cell.

[0968] In some instances, samples are used for diagnosing a disease. In some instances the disease is cancer. The sample used for cancer testing may comprise at least one target nucleic acid that may bind to a guide nucleic acid of the reagents described herein. The target nucleic acid, in some cases, comprises a portion of a gene comprising a mutation associated with cancer, a gene whose overexpression is associated with cancer, a tumor suppressor gene, an oncogene, a checkpoint inhibitor gene, a gene associated with cellular growth, a gene associated with cellular metabolism, or a gene associated with cell cycle. Sometimes, the target nucleic acid encodes a cancer biomarker, such as a prostate cancer biomarker or non-small cell lung cancer. In some cases, the assay may be used to detect “hotspots” in target nucleic acids that may be predictive of lung cancer. In some cases, the target nucleic acid comprises a portion of a nucleic acid that is associated with a blood fever. In some cases, the target nucleic acid is a portion of a nucleic acid from a genomic locus, any DNA amplicon of, a reverse transcribed mRNA, or a cDNA from a locus of at least one of: ALK, APC, ATM, AXIN2, BAP1, BARD1, BLM, BMPR1A, BRCA1, BRCA2, BRIP1, CASR, CDC73, CDH1, CDK4, CDKN1B, CDKN1C, CDKN2A, CEBPA, CHEK2, CTNNA1, DICER1, DIS3L2, EGFR, EPCAM, FH, FLCN, GATA2, GPC3, GREM1, HOXB13, HRAS, system, MAX, MEN1, MET, MITF, MLH1, MSH2, MSH3, MSH6, MUTYH, NBN, NF1, NF2, NTHL1, PALB2, PDGFRA, PHOX2B, PMS2, POLD1, POLE, POT1, PRKAR1A, PTCH1, PTEN, RAD50, RAD51C, RAD51D, RB1, RECQL4, RET, RUNX1, SDHA, SDHAF2, SDHB, SDHC, SDHD, SMAD4, SMARCA4, SMARCB1, SMARCE1, STK11, SUFU, TERC, TERT, TMEM127, TP53, TSC1, TSC2, VHL, WRN, and WT1. Any region of the aforementioned gene loci may be probed for a mutation or deletion using the compositions and methods disclosed herein. For example, in the EGFR gene locus, the compositions and methods for detection disclosed herein may be used to detect a single nucleotide polymorphism or a deletion.

[0969] In some instances, samples are used to diagnose a genetic disorder, also referred to as genetic disorder testing. The sample used for genetic disorder testing may comprise at least one target nucleic acid that may bind to a guide nucleic acid of the reagents described herein. In some instances, the genetic disorder is hemophilia, sickle cell anemia, β-thalassemia, Duchene muscular dystrophy, severe combined immunodeficiency, Huntington's disease, or cystic fibrosis. The target nucleic acid, in some cases, is from a gene with a mutation associated with a genetic disorder, from a gene whose overexpression is associated with a genetic disorder, from a gene associated with abnormal cellular growth resulting in a genetic disorder, or from a gene associated with abnormal cellular metabolism resulting in a genetic disorder. In some cases, the target nucleic acid is a nucleic acid from a genomic locus, a transcribed mRNA, or a reverse transcribed mRNA, a DNA amplicon of or a cDNA from a locus of at least one of: CFTR, FMR1, SMN1, ABCB11, ABCC8, ABCD1, ACAD9, ACADM, ACADVL, ACAT1, ACOX1, ACSF3, ADA, ADAMTS2, ADGRG1, AGA, AGL, AGPS, AGXT, AIRE, ALDH3A2, ALDOB, ALG6, ALMS1, ALPL, AMT, AQP2, ARG1, ARSA, ARSB, ASL, ASNS, ASPA, ASS1, ATM, ATP6V1B1, ATP7A, ATP7B, ATRX, BBS1, BBS10, BBS12, BBS2, BCKDHA, BCKDHB, BCS1L, BLM, BSND, CAPN3, CBS, CDH23, CEP290, CERKL, CHM, CHRNE, CIITA, CLN3, CLN5, CLN6, CLN8, CLRN1, CNGB3, COL27A1, COL4A3, COL4A4, COL4A5, COL7A1, CPS1, CPT1A, CPT2, CRB1, CTNS, CTSK, CYBA, CYBB, CYP11B1, CYP11B2, CYP17A1, CYP19A1, CYP27A1, DBT, DCLRE1C, DHCR7, DHDDS, DLD, DMD, DNAH5, DNAI1, DNAI2, DYSF, EDA, EIF2B5, EMD, ERCC6, ERCC8, ESCO2, ETFA, ETFDH, ETHE1, EVC, EVC2, EYS, F9, FAH, FAM161A, FANCA, FANCC, FANCG, FH, FKRP, FKTN, G6PC, GAA, GALC, GALK1, GALT, GAMT, GBA, GBE1, GCDH, GFM1, GJB1, GJB2, GLA, GLB1, GLDC, GLE1, GNE, GNPTAB, GNPTG, GNS, GRHPR, HADHA, HAX1, HBA1, HBA2, HBB, HEXA, HEXB, HGSNAT, HLCS, HMGCL, HOGA1, HPS1, HPS3, HSD17B4, HSD3B2, HYAL1, HYLS1, IDS, IDUA, IKBKAP, IL2RG, WD, KCNJ11, LAMA2, LAMA3, LAMB3, LAMC2, LCA5, LDLR, LDLRAP1, LHX3, LIFR, LIPA, LOXHD1, LPL, LRPPRC, MAN2B1, MCOLN1, MED17, MESP2, MFSD8, MKS1, MLC1, MMAA, MMAB, MMACHC, MMADHC, MPI, MPL, MPV17, MTHFR, MTM1, MTRR, MTTP, MUT, MYO7A, NAGLU, NAGS, NBN, NDRG1, NDUFAF5, NDUFS6, NEB, NPC1, NPC2, NPHS1, NPHS2, NR2E3, NTRK1, OAT, OPA3, OTC, PAH, PC, PCCA, PCCB, PCDH15, PDHA1, PDHB, PEX1, PEX10, PEX12, PEX2, PEX6, PEX7, PFKM, PHGDH, PKHD1, PMM2, POMGNT1, PPT1, PROP1, PRPS1, PSAP, PTS, PUS1, PYGM, RAB23, RAG2, RAPSN, RARS2, RDH12, RMRP, RPE65, RPGRIP1L, RS1, RTEL1, SACS, SAMHD1, SEPSECS, SGCA, SGCB, SGCG, SGSH, SLC12A3, SLC12A6, SLC17A5, SLC22A5, SLC25A13, SLC25A15, SLC26A2, SLC26A4, SLC35A3, SLC37A4, SLC39A4, SLC4A11, SLC6A8, SLC7A7, SMARCAL1, SMPD1, STAR, SUMF1, TAT, TCIRG1, TECPR2, TFR2, TGM1, TH, TMEM216, TPP1, TRMU, TSFM, TTPA, TYMP, USH1C, USH2A, VPS13A, VPS13B, VPS45, VRK1, VSX2, WNT10A, XPA, XPC, and ZFYVE26.

[0970] The sample used for phenotyping testing may comprise at least one target nucleic acid that may bind to a guide nucleic acid of the reagents described herein. The target nucleic acid, in some cases, is a nucleic acid encoding a sequence associated with a phenotypic trait.

[0971] The sample used for genotyping testing may comprise at least one target nucleic acid that may bind to a guide nucleic acid of the reagents described herein. The target nucleic acid, in some cases, is a nucleic acid encoding a sequence associated with a genotype of interest.

[0972] The sample used for ancestral testing may comprise at least one target nucleic acid that may bind to a guide nucleic acid of the reagents described herein. The target nucleic acid, in some cases, is a nucleic acid encoding a sequence associated with a geographic region of origin or ethnic group.

[0973] The sample may be used for identifying a disease status. For example, a sample is any sample described herein, and is obtained from a subject for use in identifying a disease status of a subject. The disease may be a cancer or genetic disorder. Sometimes, a method comprises obtaining a serum sample from a subject; and identifying a disease status of the subject. Often, the disease status is prostate disease status, but the status of any disease may be assessed.

[0974] Any of the above disclosed samples are consistent with the methods, compositions, reagents, enzymes, and systems disclosed herein.

### Exemplary Embodiments

[0975] 1. A composition comprising an effector protein, or a nucleic acid encoding the effector protein, and a guide nucleic acid, or a nucleic acid encoding the guide nucleic acid, wherein the effector protein comprises an amino acid sequence that is (a) at least 50%, at least 60%, at least 70%, at least 75%, at least 80%, at least 85%, at least 90%, at least 95%, at least 98%, at least 99% or 100% identical to SEQ ID NO: 23 and (b) includes six amino acid sequences selected from the group:
[0976] (i) an amino acid sequence that is at least 60%, at least 70%, at least 80%, at least 90%, at least 95%, at least 98%, at least 99% or 100% identical to SEQ ID NO: 793,
[0977] (ii) an amino acid sequence that is at least 60%, at least 70%, at least 80%, at least 90%, at least 95%, at least 98%, at least 99% or 100% identical to SEQ ID NO: 794,
[0978] (iii) an amino acid sequence that is at least 60%, at least 70%, at least 80%, at least 90%, at least 95%, at least 98%, at least 99% or 100% identical to SEQ ID NO: 795,
[0979] (iv) an amino acid sequence that is at least 60%, at least 70%, at least 80%, at least 90%, at least 95%, at least 98%, at least 99% or 100% identical to SEQ ID NO: 796,
[0980] (v) an amino acid sequence that is at least 60%, at least 70%, at least 80%, at least 90%, at least 95%, at least 98%, at least 99% or 100% identical to SEQ ID NO: 797,
[0981] (vi) an amino acid sequence that is at least 60%, at least 70%, at least 80%, at least 90%, at least 95%, at least 98%, at least 99% or 100% identical to SEQ ID NO: 798, and
[0982] (vii) an amino acid sequence that is at least 60%, at least 70%, at least 80%, at least 90%, at least 95%, at least 98%, at least 99% or 100% identical to SEQ ID NO: 799,
   and wherein the effector protein interacts with the guide nucleic acid to form a complex that is targeted to a target sequence via base pairing between the guide nucleic acid and the target sequence.

[0983] 2. The composition of embodiment 1, wherein the effector protein comprises seven amino acid sequences selected from the group:
[0984] (i) an amino acid sequence that is at least 40%, at least 50%, at least 60%, at least 70%, at least 80%, at least 90%, at least 95%, at least 98%, at least 99% or 100% identical to SEQ ID NO: 793,
[0985] (ii) an amino acid sequence that is at least 40%, at least 50%, at least 60%, at least 70%, at least 80%, at least 90%, at least 95%, at least 98%, at least 99% or 100% identical to SEQ ID NO: 794,
[0986] (iii) an amino acid sequence that is at least 40%, at least 50%, at least 60%, at least 70%, at least 80%, at least 90%, at least 95%, at least 98%, at least 99% or 100% identical to SEQ ID NO: 795,
[0987] (iv) an amino acid sequence that is at least 40%, at least 50%, at least 60%, at least 70%, at least 80%, at least 90%, at least 95%, at least 98%, at least 99% or 100% identical to SEQ ID NO: 796,
[0988] (v) an amino acid sequence that is at least 40%, at least 50%, at least 60%, at least 70%, at least 80%, at least 90%, at least 95%, at least 98%, at least 99% or 100% identical to SEQ ID NO: 797,
[0989] (vi) an amino acid sequence that is at least 40%, at least 50%, at least 60%, at least 70%, at least 80%, at least 90%, at least 95%, at least 98%, at least 99% or 100% identical to SEQ ID NO: 798, and
[0990] (vii) an amino acid sequence that is at least 40%, at least 50%, at least 60%, at least 70%, at least 80%, at least 90%, at least 95%, at least 98%, at least 99% or 100% identical to SEQ ID NO: 799.

[0991] 3. The composition of embodiment 1 or embodiment 2, wherein the effector protein comprises six amino acid sequences selected from the group:
[0992] (i) an amino acid sequence that is at least 69.5% identical to SEQ ID NO: 793,
[0993] (ii) an amino acid sequence that is at least 69.5% identical to SEQ ID NO: 794,
[0994] (iii) an amino acid sequence that is at least 69.5% identical to SEQ ID NO: 795,
[0995] (iv) an amino acid sequence that is at least 69.5% identical to SEQ ID NO: 796,
[0996] (v) an amino acid sequence that is at least 69.5% identical to SEQ ID NO: 797,
[0997] (vi) an amino acid sequence that is at least 69.5% identical to SEQ ID NO: 798, and
[0998] (vii) an amino acid sequence that is at least 69.5% identical to SEQ ID NO: 799.

[0999] 4. The composition of any preceding embodiment, wherein the effector protein comprises six amino acid sequences selected from the group:
[1000] (i) an amino acid sequence that is at least 80% identical to SEQ ID NO: 793,
[1001] (ii) an amino acid sequence that is at least 80% identical to SEQ ID NO: 794,
[1002] (iii) an amino acid sequence that is at least 80% identical to SEQ ID NO: 795,
[1003] (iv) an amino acid sequence that is at least 80% identical to SEQ ID NO: 796,
[1004] (v) an amino acid sequence that is at least 80% identical to SEQ ID NO: 797,
[1005] (vi) an amino acid sequence that is at least 80% identical to SEQ ID NO: 798, and
[1006] (vii) an amino acid sequence that is at least 80% identical to SEQ ID NO: 799.

[1007] 5. The composition of any one of the preceding embodiments, wherein the effector protein comprises an amino acid sequence that is at least 68% identical to SEQ ID NO:23.

[1008] 6. A composition comprising an effector protein, or a nucleic acid encoding the effector protein, and a guide nucleic acid, or a nucleic acid encoding the guide nucleic acid, wherein the effector protein comprises a sequence of amino acids that is at least 37%, at least 40%, at least 50%, at least 60%, at least 70%, at least 80%, at least 90%, at least 95%, at least 98%, at least 99% or 100% identical to SEQ ID NO: 796, and wherein the effector protein interacts with the guide nucleic acid to form a complex that is targeted to a target sequence via base pairing between the guide nucleic acid and the target sequence.

[1009] 7. The composition of embodiment 6, wherein the effector protein further comprises four amino acid sequences selected from the group:
[1010] (i) an amino acid sequence that is at least 60%, at least 70%, at least 80%, at least 90%, at least 95%, at least 98%, at least 99% or 100% identical to SEQ ID NO: 793, preferably wherein the sequence is at least 69.5% identical to SEQ ID NO: 793,
[1011] (ii) an amino acid sequence that is at least 60%, at least 70%, at least 80%, at least 90%, at least 95%, at least 98%, at least 99% or 100% identical to SEQ ID NO: 794, preferably wherein the sequence is at least 69.5% identical to SEQ ID NO: 794,
[1012] (iii) an amino acid sequence that is at least 60%, at least 70%, at least 80%, at least 90%, at least 95%, at least 98%, at least 99% or 100% identical to SEQ ID NO: 795, preferably wherein the sequence is at least 69.5% identical to SEQ ID NO: 795,
[1013] (iv) an amino acid sequence that is at least 60%, at least 70%, at least 80%, at least 90%, at least 95%, at least 98%, at least 99% or 100% identical to SEQ ID NO: 797, preferably wherein the sequence is at least 69.5% identical to SEQ ID NO: 797,
[1014] (v) an amino acid sequence that is at least 60%, at least 70%, at least 80%, at least 90%, at least 95%, at least 98%, at least 99% or 100% identical to SEQ ID NO: 798, preferably wherein the sequence is at least 69.5% identical to SEQ ID NO: 798, and
[1015] (vi) an amino acid sequence that is at least 60%, at least 70%, at least 80%, at least 90%, at least 95%, at least 98%, at least 99% or 100% identical to SEQ ID NO: 799 preferably wherein the sequence is at least 69.5% identical to SEQ ID NO: 799.

[1016] 8. The composition of embodiment 6, wherein the effector protein further comprises five amino acid sequences selected from the group:
[1017] (i) an amino acid sequence that is at least 60%, at least 70%, at least 80%, at least 90%, at least 95%, at least 98%, at least 99% or 100% identical to SEQ ID NO: 793, preferably wherein the sequence is at least 69.5% identical to SEQ ID NO: 793,
[1018] (ii) an amino acid sequence that is at least 60%, at least 70%, at least 80%, at least 90%, at least 95%, at least 98%, at least 99% or 100% identical to SEQ ID NO: 794, preferably wherein the sequence is at least 69.5% identical to SEQ ID NO: 794,
[1019] (iii) an amino acid sequence that is at least 60%, at least 70%, at least 80%, at least 90%, at least 95%, at least 98%, at least 99% or 100% identical to SEQ ID NO: 795, preferably wherein the sequence is at least 69.5% identical to SEQ ID NO: 795,
[1020] (iv) an amino acid sequence that is at least 60%, at least 70%, at least 80%, at least 90%, at least 95%, at least 98%, at least 99% or 100% identical to SEQ ID NO: 797, preferably wherein the sequence is at least 69.5% identical to SEQ ID NO: 797,
[1021] (v) an amino acid sequence that is at least 60%, at least 70%, at least 80%, at least 90%, at least 95%, at least 98%, at least 99% or 100% identical to SEQ ID NO: 798, preferably wherein the sequence is at least 69.5% identical to SEQ ID NO: 798, and
[1022] (vi) an amino acid sequence that is at least 60%, at least 70%, at least 80%, at least 90%, at least 95%, at least 98%, at least 99% or 100% identical to SEQ ID NO: 799 preferably wherein the sequence is at least 69.5% identical to SEQ ID NO: 799.

[1023] 9. The composition of embodiment 6, wherein the effector protein further comprises six amino acid sequences selected from the group:
[1024] (i) an amino acid sequence that is at least 60%, at least 70%, at least 80%, at least 90%, at least 95%, at least 98%, at least 99% or 100% identical to SEQ ID NO: 793, preferably wherein the sequence is at least 69.5% identical to SEQ ID NO: 793,
[1025] (ii) an amino acid sequence that is at least 60%, at least 70%, at least 80%, at least 90%, at least 95%, at least 98%, at least 99% or 100% identical to SEQ ID NO: 794, preferably wherein the sequence is at least 69.5% identical to SEQ ID NO: 794,
[1026] (iii) an amino acid sequence that is at least 60%, at least 70%, at least 80%, at least 90%, at least 95%, at least 98%, at least 99% or 100% identical to SEQ ID NO: 795, preferably wherein the sequence is at least 69.5% identical to SEQ ID NO: 795,
[1027] (iv) an amino acid sequence that is at least 60%, at least 70%, at least 80%, at least 90%, at least 95%, at least 98%, at least 99% or 100% identical to SEQ ID NO: 797, preferably wherein the sequence is at least 69.5% identical to SEQ ID NO: 797,
[1028] (v) an amino acid sequence that is at least 60%, at least 70%, at least 80%, at least 90%, at least 95%, at least 98%, at least 99% or 100% identical to SEQ ID NO: 798, preferably wherein the sequence is at least 69.5% identical to SEQ ID NO: 798, and
[1029] (vi) an amino acid sequence that is at least 60%, at least 70%, at least 80%, at least 90%, at least 95%, at least 98%, at least 99% or 100% identical to SEQ ID NO: 799 preferably wherein the sequence is at least 69.5% identical to SEQ ID NO: 799.

[1030] 10. The composition of any one of embodiments 6 to 9, wherein the effector protein comprises an amino acid sequence that is at least 50%, at least 60%, at least 70%, at least 75%, at least 80%, at least 85%, at least 90%, at least 95%, at least 98%, at least 99% or 100% identical to SEQ ID NO: 23.

[1031] 11. The composition of any one of the preceding embodiments, wherein the amino acid sequences having at least the threshold identity with any one of SEQ ID NO: 793 to SEQ ID NO: 799 are in the following order starting from the N terminus:
[1032] (i) the sequence having at least the threshold identity with SEQ ID NO: 796
[1033] (ii) the sequence having at least the threshold identity with SEQ ID NO: 797
[1034] (iii) the sequence having at least the threshold identity with SEQ ID NO: 795
[1035] (iv) the sequence having at least the threshold identity with SEQ ID NO: 799
[1036] (v) the sequence having at least the threshold identity with SEQ ID NO: 794
[1037] (vi) the sequence having at least the threshold identity with SEQ ID NO: 793
[1038] (vii) the sequence having at least the threshold identity with SEQ ID NO: 798.

[1039] 12. The composition of any one of the preceding embodiments, wherein the effector protein comprises an amino acid sequence that is identical to SEQ ID NO:23.

[1040] 13. The composition of any one of the preceding embodiments, wherein the wherein the guide nucleic acid is an engineered guide nucleic acid.

[1041] 14. The composition of any one of the preceding embodiments, wherein the guide nucleic acid comprises a repeat region that is least 75%, at least 80%, at least 85%, at least 90%, at least 95%, or 100% identical to any one of SEQ ID NOs 630, 641, and 827-929.

[1042] 15. The composition of any one of the preceding embodiments wherein the guide nucleic acid comprises a crRNA and a tracrRNA, optionally wherein the guide nucleic acid is a single guide nucleic acid.

[1043] 16. The composition of any one of the preceding embodiments, wherein the effector protein is about 380 to about 850 amino acids in length.

[1044] 17. The composition of embodiment 16, wherein the effector protein is about 400 to about 550 amino acids in length.

[1045] 18. The composition of any one of the preceding embodiments, wherein the effector protein is fused to a fusion partner.

[1046] 19. The composition of embodiment 18, wherein the effector protein is fused to the fusion partner via a linker protein.

[1047] 20. The composition of embodiment 18 or embodiment 19, wherein the effector protein is fused to a fusion partner at the N-terminus and/or the C-terminus.

[1048] 21. The composition of any one of embodiments 18-20, wherein the fusion partner:
[1049] (a) modulates transcription;
[1050] (b) has an enzymatic activity that modifies the target nucleic acid;
[1051] (c) has an enzymatic activity that modifies a protein associated with the target nucleic acid;
[1052] (d) modifies a nucleobase of the target nucleic acid, optionally wherein the fusion partner is a deaminase;
[1053] (e) comprises a chloroplast transit peptide;
[1054] (f) comprises an endosomal escape peptide; and/or
[1055] (g) comprises a nuclear localisation signal.

[1056] 22. The composition of any one of the preceding embodiments, wherein the effector protein is modified to reduce the nucleic acid-cleaving activity of the effector protein.

[1057] 23. The composition of embodiment 22, wherein the effector protein is enzymatically inactive.

[1058] 24. The composition of any one of the preceding embodiments, wherein the composition further comprises a donor nucleic acid.

[1059] 25. A method of detecting a target nucleic acid in a sample, comprising:

[1060] (a) contacting the sample with:
[1061] (i) the composition of any one of embodiments 1-23; and
[1062] (ii) a reporter nucleic acid, wherein a detectable signal is produced when the reporter nucleic acid is cleaved by the effector protein.

[1063] (b) detecting the detectable signal.

[1064] 26. A method of modifying a target nucleic acid, the method comprising contacting the target nucleic acid with the composition of any one of embodiments 1-24.

[1065] 27. The method of embodiment 26, wherein modifying the target nucleic acid comprises cleaving the target nucleic acid, deleting a nucleotide of the target nucleic acid, inserting a nucleotide into the target nucleic acid, substituting a nucleotide of the target nucleic acid with a donor nucleotide or an additional nucleotide, or any combination thereof.

[1066] 28. The method of embodiment 26 or embodiment 27, wherein the contacting occurs in vitro, in vivo or ex vivo.

[1067] 29. The method of embodiment 28, wherein the contracting comprises introducing the composition of any one of embodiments 1-24 into a cell, optionally wherein the cell is a eukaryotic cell.

[1068] 30. A cell modified by the method of embodiment 29.

[1069] 31. The composition of any one of embodiments 1-24 for use in therapy.

[1070] 32. A method of treating a patient comprising administering the composition of any one of embodiments 1-24.

### EXAMPLES

[1071] The following examples are included for illustrative purposes only and are not intended to limit the scope of the invention.

### Example 1: PAM Screening for D2S Effector Proteins

[1072] D2S effector proteins and guide RNA combinations represented in TABLE 5 were screened by in vitro enrichment (IVE) for PAM recognition. TABLE 5 shows the components of each effector protein-guide RNA complex assayed for PAM recognition. The amino acid sequences of the effector protein names in the second column of the table are shown in TABLE 1 herein. The nucleobase sequences of the guide components in the third through sixth columns of the table are shown in TABLE 2 and TABLE 3 herein. For example, as shown in TABLE 2, an effector protein comprising an amino acid sequence of SEQ ID NO:1 complexed with a guide comprising a crRNA of SEQ ID NO: 46 and a tracrRNA of SEQ ID NO: 91 was screened for PAM recognition. Briefly, effector proteins were complexed with corresponding guide RNAs for 15 minutes at 37° C. The complexes were added to an IVE reaction mix. PAM screening reactions used 10 μl of RNP in 100 μl reactions with 1,000 ng of a 5′ PAM library in 1× Cutsmart buffer and were carried out for 15 minutes at 25° C., 45 minutes at 37° C. and 15 minutes at 45° C. Reactions were terminated with 1 μl of proteinase K and 5 μl of 500 mM EDTA for 30 minutes at 37° C. Next generation sequencing was performed on cut sequences to identify enriched PAMs. As shown in TABLE 5, cis cleavages were observed with RNP complexes comprising D2S effector proteins and corresponding guide RNAs.

TABLE 5
Observed Cis Cleavage for Effector Protein/Guide Combinations

| | | cis- | | | |
|---|---|---|---|---|---|
| Comp. | | cleavage | | | |
| No: | Effector Protein | (y/n) | crRNA # | tracrRNA # | sgRNA # |
| 1 | CasM.298706 | Y | R4879 (SEQ ID | R4935 (SEQ ID NO: | — |
| | (SEQ ID NO: 1) | | NO: 46) | 91) | |
| 4 | CasM.284933 (SEQ | Y | R4841 (SEQ ID | R4902 (SEQ ID NO: | — |
| | ID NO: 4) | | NO: 49) | 94) | |
| 13 | CasM.297894 (SEQ | Y | R4987 (SEQ ID | R4904 (SEQ ID NO: | — |
| | ID NO: 13) | | NO: 58) | 103) | |
| 14 | CasM.291449 (SEQ | N | R4875 (SEQ ID | R4939 (SEQ ID NO: | — |
| | ID NO: 14) | | NO: 59) | 104) | |
| 15 | CasM.291449 (SEQ | N | R4875 (SEQ ID | R4938 (SEQ ID NO: | — |
| | ID NO: 14) | | NO: 59) | 105) | |
| 16 | CasM.297599 (SEQ | Y | R4876 (SEQ ID | R4892 (SEQ ID NO: | — |
| | ID NO: 15) | | NO: 60) | 106) | |
| 17 | CasM.297599 (SEQ | Y | R4876 (SEQ ID | R4942 (SEQ ID NO: | — |
| | ID NO: 15) | | NO: 60) | 107) | |
| 23 | CasM.292335 (SEQ | Y | R4851 (SEQ ID | R4907 (SEQ ID NO: | — |
| | ID NO: 18) | | NO: 63) | 113) | |
| 24 | CasM.293576 (SEQ | Y | R4852 (SEQ ID | R4896 (SEQ ID NO: | — |
| | ID NO: 19) | | NO: 64) | 114) | |
| 28 | CasM.298538 (SEQ | Y | R4854 (SEQ ID | R4897 (SEQ ID NO: | — |
| | ID NO: 21) | | NO: 66) | 118) | |
| 30 | CasM.19924 (SEQ | Y | R4855 (SEQ ID | R4893 (SEQ ID | — |
| | ID NO: 22) | | NO: 67) | NO: 120) | |
| 31 | CasM.19924 (SEQ | Y | — | — | R4886 (SEQ ID |
| | ID NO: 22) | | | | NO: 149) |
| 32 | CasM.19952 (SEQ | Y | R4856 (SEQ ID | R4893 (SEQ ID NO: | — |
| | ID NO: 23) | | NO: 68) | 120) | |
| 33 | CasM.19952 (SEQ | Y | — | — | R4886 (SEQ ID |
| | ID NO: 23) | | | | NO: 149) |
| 34 | CasM.274559 (SEQ | Y | R4857 (SEQ ID | R4894 (SEQ ID NO: | — |
| | ID NO: 24) | | NO: 69) | 121) | |
| 35 | CasM.274559 (SEQ | Y | — | — | R4887(SEQ ID |
| | ID NO: 24) | | | | NO: 150) |
| 36 | CasM.286251 (SEQ | Y | R4858 (SEQ ID | R4910 (SEQ ID NO: | — |
| | ID NO: 25) | | NO: 70) | 122) | |
| 37 | CasM.286251 (SEQ | Y | — | — | R4882 (SEQ ID |
| | ID NO: 25) | | | | NO: 151) |
| 39 | CasM.288480 (SEQ | Y | — | — | R4886 (SEQ ID |
| | ID NO: 26) | | | | NO: 149) |
| 41 | CasM.289206 | Y | R4861 (SEQ ID | R4894 (SEQ ID NO: | — |
| | 289206 (SEQ ID NO: | | NO: 73) | 121) | |
| | 28) | | | | |
| 42 | CasM.289206 (SEQ | Y | — | — | R4887 (SEQ ID |
| | ID NO: 28) | | | | NO: 150) |
| 43 | CasM.290598 (SEQ | Y | R4862 (SEQ ID | R4894 (SEQ ID NO: | — |
| | ID NO: 29) | | NO: 74) | 121) | |
| 45 | CasM.290816 (SEQ | Y | R4863 (SEQ ID | R4912 (SEQ ID NO: | — |
| | ID NO: 30) | | NO: 75) | 124) | |
| 48 | CasM.295071 (SEQ | Y | — | — | R4882(SEQ ID |
| | ID NO: 31) | | | | NO: 151) |
| 50 | CasM.295231(SEQ | Y | — | — | R4884 (SEQ ID |
| | ID NO: 32) | | | | NO: 152) |
| 54 | CasM.279423 (SEQ | Y | R4857 (SEQ ID | R4894 (SEQ ID NO: | — |
| | ID NO: 34) | | NO: 79) | 127) | |
| 71 | CasM.295105 (SEQ | Y | R4872(SEQ ID | R4925 (SEQ ID NO: | — |
| | ID NO: 43) | | NO: 88) | 144) | |
| 72 | CasM.295187 (SEQ | Y | R4873 (SEQ ID | R4945 (SEQ ID NO: | — |
| | ID NO: 44) | | NO: 89) | 145) | |
| 74 | CasM.295929 (SEQ | Y | R4874 (SEQ ID | R4928 (SEQ ID NO: | — |
| | ID NO: 45) | | NO: 90) | 147) | |
| 75 | CasM.295929 (SEQ | Y | R4874 (SEQ ID | R4927 (SEQ ID NO: | — |
| | ID NO: 45) | | NO: 90) | 148) | |

TABLE 6
Exemplary PAM Sequences

| Comp. | Effector Protein | Amino Acid | |
|---|---|---|---|
| No | Name | SEQ ID NO: | PAM Sequence |
| 1 | CasM.298706 | 1 | CTT (SEQ ID NO: 154) |
| 13 | CasM.297894 | 13 | CTT (SEQ ID NO: 154) |
| 16 | CasM.297599 | 15 | CC (SEQ ID NO: 155) |
| 17 | CasM.297599 | 15 | CC (SEQ ID NO: 155) |
| 23 | CasM.292335 | 18 | CC (SEQ ID NO: 155) |
| 24 | CasM.293576 | 19 | CC (SEQ ID NO: 155) |
| 28 | CasM.298538 | 21 | TC (SEQ ID NO: 164) |
| 30 | CasM.19924 | 22 | TCG (SEQ ID NO: 156) |
| 31 | CasM.19924 | 22 | GCG (SEQ ID NO: 157) |
| 32 | CasM.19952 | 23 | TCG (SEQ ID NO: 156), TTG (SEQ ID NO: 158), |
| | | | GCG (SEQ ID NO: 157), GTG (SEQ ID NO: 159) |
| 33 | CasM.19952 | 23 | TCG (SEQ ID NO: 156), TTG (SEQ ID NO: 158), |
| | | | GCG (SEQ ID NO: 157), GTG (SEQ ID NO: 159) |
| 34 | CasM.274559 | 24 | TCG (SEQ ID NO: 156) |
| 35 | CasM.274559 | 24 | TCG (SEQ ID NO: 156) |
| 36 | CasM.286251 | 25 | ATTA (SEQ ID NO: 160), ATTG (SEQ ID NO: 161), |
| | | | GTTA (SEQ ID NO: 162), GTTG (SEQ ID NO: 163) |
| 37 | CasM.286251 | 25 | ATTA (SEQ ID NO: 160), ATTG (SEQ ID NO: 161), |
| | | | GTTA (SEQ ID NO: 162), GTTG (SEQ ID NO: 163) |
| 39 | CasM.288480 | 26 | TCG (SEQ ID NO: 156) |
| 41 | CasM.289206 | 28 | ATTA (SEQ ID NO: 160), ATTG (SEQ ID NO: 161), |
| | | | GTTA (SEQ ID NO: 162), GTTG (SEQ ID NO: 163) |
| 42 | CasM.289206 | 28 | ATTA (SEQ ID NO: 160), ATTG (SEQ ID NO: 161), |
| | | | GTTA (SEQ ID NO: 162), GTTG (SEQ ID NO: 163) |
| 43 | CasM.290598 | 29 | ATTG (SEQ ID NO: 161), ACTG (SEQ ID NO: 165), |
| | | | GTTG (SEQ ID NO: 163), GCTG (SEQ ID NO: 166) |
| 46 | CasM.290816 | 30 | TCG (SEQ ID NO: 156) |
| 48 | CasM.295071 | 31 | ATTA (SEQ ID NO: 160), ATTG (SEQ ID NO: 161), |
| | | | GTTA (SEQ ID NO: 162), GTTG (SEQ ID NO: 163) |
| 50 | CasM.295231 | 32 | TCG (SEQ ID NO: 156) or GCG (SEQ ID NO: 157) |
| 54 | CasM.279423 | 34 | ATTA (SEQ ID NO: 160), ATTG (SEQ ID NO: 161), |
| | | | GTTA (SEQ ID NO: 162), GTTG (SEQ ID NO: 163) |
| 71 | CasM.295105 | 43 | TTC (SEQ ID NO: 167) |
| 72 | CasM.295187 | 44 | TTC (SEQ ID NO: 167) |
| 74 | CasM.295929 | 45 | TTT (SEQ ID NO: 168), TTC (SEQ ID NO: 167) |
| 75 | CasM.295929 | 45 | TTT (SEQ ID NO: 168), TTC (SEQ ID NO: 167) |

[1073] FIG. 1 illustrates the composition of the sequences derived from libraries digested with RNP complexes comprising the denoted D2S effector proteins. As shown in FIG. 1, examination of the PFM derived WebLogos (FIG. 1) revealed the presence of enriched 5′ PAM consensus sequences for the various D2S effector proteins.

### Example 2: DETECTR Activity of D2S Effector Proteins

[1074] D2S effector proteins were tested for trans cleavage. Briefly, partially purified (nickel-NTA purified) D2S effector proteins were incubated with crRNA and tracrRNA or sgRNAs in a trans cleavage buffer (20 mM Tricine, 15 mM MgCl2, 0.2 mg/ml BSA, 1 mM TCEP (pH 9 at 37° C.) at room temperature for 20 minutes, followed by addition of target nucleic acid at a final concentration of 10 nM to produce effector-protein guide complexes. The components of the effector-protein guide complexes that were assayed are provided in TABLE 7. Trans cleavage activity was detected by fluorescence signal upon cleavage of a fluorophore-quencher reporter in a DETECTR reaction. Dilutions were of the effector-protein guide complexes were performed, and the assay repeated at 1%, 0.1% or 0.01% of the original protein concentration. The dilution that provided the highest signal ratio is listed.

TABLE 7
Observed Trans Cleavage for Effector Protein/Guide Combination

| Comp. | Effector | Fold | | | | | |
|---|---|---|---|---|---|---|---|
| No: | Protein | on/off ** | Dilution *** | Plasmid # | crRNA # | tracrRNA # | sgRNA # |
| 25 | CasM.293576 | 1.69 | 0.1 | PL3316 | R4852 (SEQ | R4908 (SEQ | — |
| | (SEQ ID NO: 19) | | | | ID NO: 64) | ID NO: 115) | |
| 26 | CasM.294537 | 2.97 | 0.1 | PL3320 | R4853 (SEQ | R4941 (SEQ | — |
| | (SEQ ID NO: 20) | | | | ID NO: 65) | ID NO: 116) | |
| 27 | CasM.294537 | 2.05 | 0.01 | PL3320 | R4853 (SEQ | R4940 (SEQ | — |
| | (SEQ ID NO: 20) | | | | ID NO: 65) | ID NO: 117) | |
| 31 | CasM.19924 | 1.62 | 0.01 | PL3295 | — | — | R4886 (SEQ |
| | (SEQ ID NO: 22) | | | | | | ID NO: 149) |
| 32 | CasM.19952 | 2.08 | 0.1 | PL3296 | R4856 (SEQ | R4893 (SEQ | — |
| | (SEQ ID NO: 23) | | | | ID NO: 68) | ID NO: 120) | |
| 34 | CasM.274559 | 2.42 | 0.1 | PL3297 | R4857 (SEQ | R4894 (SEQ | — |
| | (SEQ ID NO: 24) | | | | ID NO: 69) | ID NO: 121) | |
| 38 | CasM.288480 | 2.74 | 0.01 | PL3307 | R4859 (SEQ | R4893 (SEQ | — |
| | (SEQ ID NO: 26) | | | | ID NO: 71) | ID NO: 120) | |
| 39 | CasM.288480 | 2.77 | 0.1 | PL3307 | — | — | R4886 (SEQ |
| | (SEQ ID NO: 26) | | | | | | ID NO: 149) |
| 41 | CasM.289206 | 1.8 | 0.01 | PL3310 | R4861 (SEQ | R4894 (SEQ | — |
| | 289206 (SEQ ID | | | | ID NO: 73) | ID NO: 121) | |
| | NO: 28) | | | | | | |
| 42 | CasM.289206 | 1.58 | 0.01 | PL3310 | — | — | R4887 (SEQ |
| | (SEQ ID NO: 28) | | | | | | ID NO: 150) |
| 44 | CasM.290598 | 1.64 | 0.01 | PL3311 | — | — | R4887 (SEQ |
| | (SEQ ID NO: 29) | | | | | | ID NO: 150) |
| 45 | CasM.290816 | 1.72 | 1 | PL3312 | R4863 (SEQ | R4912 (SEQ | — |
| | (SEQ ID NO: 30) | | | | ID NO: 75) | ID NO: 124) | |
| 46 | CasM.290816 | 1.61 | 1 | PL3312 | — | — | R4884 (SEQ |
| | (SEQ ID NO: 30) | | | | | | ID NO: 152) |
| 51 | CasM.292139 | 1.64 | 0.01 | PL3314 | R4989 (SEQ | R4890 (SEQ | — |
| | (SEQ ID NO: 33) | | | | ID NO: 78) | ID NO: 125) | |
| 53 | CasM.292139 | 1.89 | 1 | PL3314 | | | R4885 (SEQ |
| | (SEQ ID NO: 33) | | | | | | ID NO: 153) |
| 59 | CasM.282952 | 1.52 | 0.01 | PL3412 | R4867 (SEQ | R4918 (SEQ | |
| | (SEQ ID NO: 37) | | | | ID NO: 82) | ID NO: 132) | |
| 62 | CasM.283262 | 1.66 | 0.1 | PL3413 | R4868 (SEQ | R4919 (SEQ | |
| | (SEQ ID NO: 38) | | | | ID NO: 83) | ID NO: 135) | |
| 66 | CasM.291507 | 2.1 | 0.01 | PL3416 | R4871(SEQ | R4944 (SEQ | |
| | (SEQ ID NO: 41) | | | | ID NO: 86) | ID NO: 140) | |
| 74 | CasM.295929 | 2.25 | 0.1 | PL3420 | R4874 (SEQ | R4928 (SEQ | |
| | (SEQ ID NO: 45) | | | | ID NO: 90) | ID NO: 147) | |
| 75 | CasM.295929 | 1.65 | 0.1 | PL3420 | R4874 (SEQ | R4927 (SEQ | |
| | (SEQ ID NO: 45) | | | | ID NO: 90) | ID NO: 148) | |

** for those with trans-cleavage above 1.5 fold over no target
*** dilution for maximum trans cleavage activity

### Example 3: CasM 19952 Edits Genomic DNA in Mammalian Cells

[1075] CasM.19952 was tested for its ability to produce indels in HEK293T cells. Briefly, a plasmid encoding CasM.19952 and a guide RNA was delivered by lipofection to HEK293T cells. This was performed for a variety of guide RNAs targeting up to twenty-four loci adjacent to biochemically determined PAM sequences. Indels were detected by next generation sequencing of PCR amplicons at the targeted loci and indel percentage was calculated as the fraction of sequencing reads containing insertions or deletions relative to an unedited reference sequence. Sequencing libraries with less than 20% of reads aligning to the reference sequence were excluded from the analysis for quality control purposes. “No plasmid” and SpyCas9 were included as negative and positive controls, respectively. FIG. 2 shows the results. TABLE 8 describes the sequences of the single guide RNAs tested that provided the greatest percent of reads with indels. Non-bold, non-italicized, capital letters indicate the repeat sequence of the guide RNA; italicized letters indicate a linker; bold letters indicate the tracrRNA region; and the lowercase letters represent the spacer sequence. This experiment demonstrated that CasM.19952 is a robust editor of genomic DNA in mammalian cells.

[1076] A dose-response experiment confirmed the genome editing capability of CasM.19952 in mammalian cells. Plasmids encoding CasM.19952 and single guide RNAs were delivered at various concentrations by lipofection into HEK293T. CasM.19952 was programmed to target four loci. SpyCas9 was included as a positive control. Indels were observed at all four loci. Results are shown in FIG. 3.

TABLE 8
sgRNAs that provided genome editing with CasM.19952 in
HEK293T cells

| | percent of |
|---|---|
| | reads with |
| sgRNA | indels |
| UGGGGCAGUUGGUUGCCCUUAGCCUGAGGCAUUUAUUGCACUCG | 13.47 |
| GGAAGUACCAUUUCUCA [symbol] UGGUACAUCCAACucuaggcgcccgcuaag | |
| uuc (SEQ ID NO: 180) | |
| UGGGGCAGUUGGUUGCCCUUAGCCUGAGGCAUUUAUUGCACUCG | 4.63 |
| GGAAGUACCAUUUCUCA [symbol] UGGUACAUCCAACcccggguaagccugucu | |
| gcu (SEQ ID NO: 181) | |
| UGGGGCAGUUGGUUGCCCUUAGCCUGAGGCAUUUAUUGCACUCG | 19.40 |
| GGAAGUACCALUUCUCA [symbol] UGGUACAUCCAACcgugcugnuuccucccc | |
| acg (SEQ ID NO: 182) | |
| UGGGGCAGUUGGUUGCCCUUAGCCUGAGGCAUUUAUUGCACUCG | 3.15 |
| GGAAGUACCAUUUCUCA [symbol] UGGUACAUCCAACgugccuuaguuucuuca | |
| ucu (SEQ ID NO: 183) | |
| UGGGGCAGUUGGUUGCCCUUAGCCUGAGGCAUUUAUUGCACUCG | 18.35 |
| GGAAGUACCAUUUCUCA [symbol] UGGUACAUCCAACgggggcgggggggagaa | |
| aaa (SEQ ID NO: 184) | |
| UGGGGCAGUUGGUUGCCCUUAGCCUGAGGCAUUUAUUGCACUCG | 9.48 |
| GGAAGUACCAUUUCUCA [symbol] UGGUACAUCCAACgcgcccuccgaucuggg | |
| gug (SEQ ID NO: 185) | |

### Example 4: CasM 19952 Variants Edit Genomic DNA in Mammalian Cells with Greater Efficiency

[1077] Variants of CasM.19952 were generated and tested to identify variants with increased binding affinity and greater genomic editing efficiency relative to that of CasM.19952. Briefly, plasmid constructs encoding variants of CasM.19952 (SEQ ID NO: 23) were generated by mutating nucleotides that encode single amino acids of interest within the REC, RuvC-I, or RuvC-II domain from the wild-type residue to arginine, with the exception of residues that were already arginine. Generated variants had a single amino acid alteration—an arginine (R)—at amino acid positions A110, T111, E112, M113, S114, T115, Q116, S117, L118, S119, F122, A123, T124, E125, L126, E127, T128, N129, 1130, F131, A132, K261, V263, V264, G265, V266, D267, L268, G269, 1270, N271, V272, P273, A274, Y275, V276, A277, T278, N279, 1280, T281, E282, 1457, A458, N459, S460, K461, D462, 1463, 1464, K466, N467, or E468 as set forth in SEQ ID NOS: 241-293 of TABLE 9 (positions identified with respect to SEQ ID NO: 23). Wild-type CasM.19952 (wt) (SEQ ID NO: 23) was included as a control.

[1078] Plasmid preparations of the various constructs were assessed for purity by absorbance and normalized to 100 ng/uL.

[1079] Each variant and control plasmid were incubated in reduced serum media (Opti-MEM) with equivolume of plasmids containing a sgRNA targeting either B2M2 or B2M4 (both normalized to 100 ng/uL, 1:1 mass of sgRNA plasmid:nuclease plasmid).

[1080] The mixture containing a CasM.19952 variant plasmid constructs and sgRNA targeting B2M2 or B2M4 DNA plasmid constructs were delivered by lipofection to HEK293T cells. Indels were detected by next generation sequencing of PCR amplicons at the targeted locis. Target and primer sequences used to amplify the amplicons can be seen in TABLE 10. Indel percentage was calculated as the fraction of sequencing reads containing insertions or deletions relative to an unedited reference sequence. Results are shown in TABLE 11 and TABLE 12. To demonstrate relative nuclease activity, the mean of replicate values were plotted in relation to the two target loci, as grouped by domain, and normalized to the wild type. Results can be seen in FIGS. 4-6.

TABLE 9
Exemplary Variants of CasM.19952 SEQ ID NO: 23

| Construct no. | Alteration | SEQ ID NO: |
|---|---|---|
| 1 | A110R | 241 |
| 2 | T111R | 242 |
| 3 | E112R | 243 |
| 4 | M113R | 244 |
| 5 | S114R | 245 |
| 6 | T115R | 246 |
| 7 | Q116R | 247 |
| 8 | S117R | 248 |
| 9 | L118R | 249 |
| 10 | S119R | 250 |
| 11 | F122R | 251 |
| 12 | A123R | 252 |
| 13 | T124R | 253 |
| 14 | E125R | 254 |
| 15 | L126R | 255 |
| 16 | E127R | 256 |
| 17 | T128R | 257 |
| 18 | N129R | 258 |
| 19 | I130R | 259 |
| 20 | F131R | 260 |
| 21 | A132R | 261 |
| 22 | K261R | 262 |
| 23 | V263R | 263 |
| 24 | V264R | 264 |
| 25 | G265R | 265 |
| 26 | V266R | 266 |
| 27 | D267R | 267 |
| 28 | L268R | 268 |
| 29 | G269R | 269 |
| 30 | I270R | 270 |
| 31 | N271R | 271 |
| 32 | V272R | 272 |
| 33 | P273R | 273 |
| 34 | A274R | 274 |
| 35 | Y275R | 275 |
| 36 | V276R | 276 |
| 37 | A277R | 277 |
| 38 | T278R | 278 |
| 39 | N279R | 279 |
| 40 | I280R | 280 |
| 41 | T281R | 281 |
| 42 | E282R | 282 |
| 43 | I457R | 283 |
| 44 | A458R | 284 |
| 45 | N459R | 285 |
| 46 | S460R | 286 |
| 47 | K461R | 287 |
| 48 | D462R | 288 |
| 49 | I463R | 289 |
| 50 | I464R | 290 |
| 51 | K466R | 291 |
| 52 | N467R | 292 |
| 53 | E468R | 293 |
| 54 | wt | 23 |

TABLE 10
Target Amplicon Primers

| Target | Spacer Target | Forward | Reverse |
|---|---|---|---|
| B2M2 | GATGGATGAAA | TCGTCGGCAGCGTCAGATG | GTCTCGTGGGCTCGGAGA |
| | CCCAGACAC | TGTATAAGAGACAGCCCA | TGTGTATAAGAGACAGCA |
| | (SEQ ID NO: 294) | AGTGAAATACCCTGGC | GTGGGGGTGAATTCAGTG |
| | | (SEQ ID NO: 295) | (SEQ ID NO: 296) |
| B2M4 | GGCCGAGATGT | TCGTCGGCAGCGTCAGATG | GTCTCGTGGGCTCGGAGA |
| | CTCGCTCCG | TGTATAAGAGACAGCCTCT | TGTGTATAAGAGACAGGA |
| | (SEQ ID NO: 297) | CTCTAACCTGGCACT (SEQ | GGGTAGGAGAGACTCACG |
| | | ID NO: 298) | (SEQ ID NO: 299) |

TABLE 11
Variants of CasM.19952 (SEQ ID NO: 23) Targeting B2M2

| Construct | Replicate 1- | Replicate 2- |
|---|---|---|
| no. | Indel Percentage | Indel Percentage |
| 1 | 0.0243709255 | 0.0264183343 |
| 2 | 11.80903008 | 11.55975252 |
| 3 | 0.1590562662 | 0.1213469512 |
| 4 | 3.909401179 | 4.195510803 |
| 5 | 9.633175559 | 11.74726578 |
| 6 | 11.93083574 | 13.08492201 |
| 7 | 5.841839872 | 6.696656784 |
| 8 | 0.1928358558 | 0.0889397116 |
| 9 | 1.801434152 | 3.262092239 |
| 10 | 0.0268326715 | 0.0098653381 |
| 11 | 0.070387837 | 0.0260586319 |
| 12 | 0.0272464716 | 0.0142257629 |
| 13 | 25.83235981 | 26.42070165 |
| 14 | 1.615731463 | 2.090964591 |
| 15 | 11.28852581 | 16.0710087 |
| 16 | 17.00047814 | 18.90607948 |
| 17 | 23.57286157 | 27.76788893 |
| 18 | 19.93106844 | 20.97760787 |
| 19 | 8.294062206 | 9.293997272 |
| 20 | 7.2338181 | 7.218394488 |
| 21 | 15.28013582 | 17.52549286 |
| 22 | 12.13839579 | 17.73327366 |
| 23 | 12.54012092 | 12.29857971 |
| 24 | 0 | 0.0223580265 |
| 25 | 0 | 0.0160935572 |
| 26 | 0.0260111848 | 0.0059616072 |
| 27 | 0.0316605984 | 0.0118406252 |
| 28 | 0.054542149 | 0.0343760743 |
| 29 | 0.0124633888 | 0.0119524293 |
| 30 | 0.0198124422 | 0 |
| 31 | 4.04440444 | 3.583941914 |
| 32 | 1.672555948 | 2.454394693 |
| 33 | 16.73819743 | 23.40479193 |
| 34 | 0 | 0.0056471651 |
| 35 | 0.0784481529 | 0.0056322163 |
| 36 | 0.0607964333 | 0.031375502 |
| 37 | 20.69262084 | 25.1319078 |
| 38 | 29.06575985 | 36.80249309 |
| 39 | 17.75051476 | 21.01206434 |
| 40 | 9.301425531 | 9.378700069 |
| 41 | 27.23742383 | 30.56776133 |
| 42 | 31.50726855 | 33.27960874 |
| 43 | 0.0061500615 | 0.0119581465 |
| 44 | 14.77835163 | 17.02872382 |
| 45 | 16.75675676 | 20.11758074 |
| 46 | 15.34582987 | 21.32122969 |
| 47 | 9.505341724 | 10.49826475 |
| 48 | 20.29582318 | 20.18798529 |
| 49 | 7.359531196 | 8.803426593 |
| 50 | 8.905185961 | 11.81126487 |
| 51 | 14.61948354 | 19.14845559 |
| 52 | 11.45315152 | 13.39380197 |
| 53 | 10.60639471 | 14.31117352 |
| 54 | 0.0203984497 | 0.033792346 |

TABLE 12
Variants of CasM.19952 (SEQ ID NO: 23) Targeting B2M4

| Construct | Replicate 1- | Replicate 2- |
|---|---|---|
| no. | Indel Percentage | Indel Percentage |
| 1 | 0.043185352 | 0.018146625 |
| 2 | 4.133738602 | 4.038123903 |
| 3 | 0.169546262 | 0.073549077 |
| 4 | 1.873151495 | 1.722811875 |
| 5 | 2.298481933 | 2.992013351 |
| 6 | 5.513433935 | 4.681369233 |
| 7 | 2.365221987 | 2.358761113 |
| 8 | 0.07403419 | 0.015896988 |
| 9 | 0.777565328 | 0.699813759 |
| 10 | 0.029262583 | 0.007087675 |
| 11 | 0.081509082 | 0.100493331 |
| 12 | 0.017353579 | 0 |
| 13 | 5.93902898 | 8.131763208 |
| 14 | 0.861000587 | 0.706082518 |
| 15 | 4.682963379 | 6.506568145 |
| 16 | 5.439283716 | 5.788635157 |
| 17 | 8.984796469 | 12.06173461 |
| 18 | 7.740565583 | 7.89090152 |
| 19 | 2.071005917 | 2.201331767 |
| 20 | 4.907545351 | 3.173109819 |
| 21 | 3.894992153 | 4.444144266 |
| 22 | 5.706861707 | 8.00478919 |
| 23 | 5.482057219 | 5.428681276 |
| 24 | 0.132751754 | 0.042423814 |
| 25 | 0.006322311 | 0.011249859 |
| 26 | 0.139679811 | 0.037074798 |
| 27 | 0 | 0.040025616 |
| 28 | 0.173451689 | 0.349344978 |
| 29 | 0 | 0.023699491 |
| 30 | 0.016924769 | 0.020249064 |
| 31 | 0.739534568 | 0.882793411 |
| 32 | 0.333111259 | 0.610736098 |
| 33 | 0.659563673 | 1.160872875 |
| 34 | 0.029513035 | 0.019199386 |
| 35 | 0.108069164 | 0.009848336 |
| 36 | 0.012193635 | 0.009329229 |
| 37 | 0.422500207 | 0.818021646 |
| 38 | 8.529945554 | 10.53685168 |
| 39 | 2.823706249 | 3.787957842 |
| 40 | 2.182810368 | 2.912861022 |
| 41 | 6.361163423 | 9.705258539 |
| 42 | 7.744796998 | 11.33583268 |
| 43 | 0.032425422 | 0 |
| 44 | 0.075677312 | 0.194590387 |
| 45 | 4.940509915 | 6.497097042 |
| 46 | 4.612868048 | 5.634609094 |
| 47 | 2.681992337 | 4.139978128 |
| 48 | 4.959950709 | 6.668446699 |
| 49 | 4.043285785 | 4.850129028 |
| 50 | 3.731494626 | 4.326276882 |
| 51 | 5.679806919 | 7.238833071 |
| 52 | 5.537331059 | 5.336870027 |
| 53 | 6.186200959 | 6.520273524 |
| 54 | 0.0067999456 | 0.0299401198 |

### Example 5: PAM Screening for D2S Effector Proteins

[1081] D2S effector proteins and guide RNA combinations were screened by in vitro enrichment (IVE) for PAM recognition. Effector proteins and guide RNAs were expressed and purified from E. coli. Briefly, effector proteins were complexed with corresponding guide RNAs for 15 minutes at 37° C. The complexes were added to an IVE reaction mix. PAM screening reactions used 10 μl of RNP in 100 μl reactions with 1,000 ng of a 5′ PAM library in 1× Cutsmart buffer and were carried out for 15 minutes at 25° C., 45 minutes at 37° C. and 15 minutes at 45° C. Reactions were terminated with 1 μl of proteinase K and 5 μl of 500 mM EDTA for 30 minutes at 37° C. Cis cleavage by each complex was confirmed by gel electrophoresis. Next generation sequencing was performed on cut sequences to confirm enriched PAMs. The PAM enrichment for the top 5% enrichment (PAM 5% in TABLE 13) generally had lower signal due to more noise than the 1% (PAM 1% in TABLE 13). In some cases the 1% enrichment met the cutoff criteria, but the 5% enrichment did not. In such cases, a PAM is included for the 1% enrichment, but not the 5% enrichment. Complexes (e.g., the composition) and corresponding identified PAMs are provided in TABLE 13. Additionally, TABLE 13 also shows the effector protein Seq ID NO (under Enzyme Seq ID NO), and the cr/sgRNA designation number, tracr RNA designation number, and their corresponding sequences if applicable. Additionally, FIGS. 7A-7E illustrate PAM preferences for the different D2S effector proteins used in this example. As shown in TABLE 13, the IVE assay revealed the presence of enriched 5′ PAM consensus sequences for the various D2S effector proteins.

TABLE 13
Compositions for D2S effector protein PAM screening

| | | | cr/sgRNA # | | tracrRNA # |
|---|---|---|---|---|---|
| Comp. Enzyme | | | cr/sgRNA Seq ID | cr/ | tracrRNA Seq ID |
| Seq ID NO. | PAM_1 % | PAM_5 % | NO. | sgRNA | NO. |
| PL3314, R4882 | NNNKNTK (SEQ ID NO: 310) | NNNNNTN (SEQ ID NO: 319) | R4882 | sgRNA | |
| 33 | | | (SEQ ID NO: 151) | | |
| PL3314, R4887 | NNNKNTT (SEQ ID NO: 311) | NNNNNTN (SEQ ID NO: 319) | R4887 | SgRNA | |
| 33 | | | (SEQ ID NO: 150) | | |
| PL3318, R4845, | NNNNTTC (SEQ ID NO: 331) | NNNNTNN (SEQ ID NO: 329) | R4845 | crRNA | R5946 |
| R5946 | | | (SEQ ID NO: 53) | | (Seq ID NO: 372) |
| 8 | | | | | |
| PL3318, R5938 | NNNNYTN (SEQ ID NO: 338) | NNNNTYN (SEQ ID NO: 335) | R5938 | sgRNA | |
| 8 | | | (SEQ ID NO: 373) | | |
| PL3411, R4873, | NNNNTTC (SEQ ID NO: 331) | NNNNTTN (SEQ ID NO: 332) | R4873 | crRNA | R4945 |
| R4945 | | | (SEQ ID NO: 89) | | (SEQ ID NO: 145) |
| 36 | | | | | |
| PL3411, R4874, | NNNNTTC (SEQ ID NO: 331) | NNNNTTY (SEQ ID NO: 333) | R4874 | crRNA | R4928 |
| R4928 | | | (SEQ ID NO: 90) | | (SEQ ID NO: 147) |
| 36 | | | | | |
| PL3411,R5867 | NNNTTCN (SEQ ID NO: 351) | NNNTTYN (SEQ ID NO: 354) | R5867 | sgRNA | |
| 36 | | | (SEQ ID NO: 374) | | |
| PL3411,R5868 | NNNNTTC (SEQ ID NO: 331) | NNNNTTY (SEQ ID NO: 333) | R5868 | sgRNA | |
| 36 | | | (SEQ ID NO: 375) | | |
| PL3411,R5925 | NNNNTTC (SEQ ID NO: 331) | NNNNTTY (SEQ ID NO: 333) | R5925 | sgRNA | |
| 36 | | | (SEQ ID NO: 376) | | |
| PL3412, R4874, | NNNNTTY (SEQ ID NO: 333) | NNNNYTY (SEQ ID NO: 339) | R4874 | crRNA | R4928 |
| R4928 | | | (SEQ ID NO: 90) | | (SEQ ID NO: 147) |
| 37 | | | | | |
| PL3412, R5925 | NNNNNTY (SEQ ID NO: 320) | NNNNNTY (SEQ ID NO: 320) | R5925 | sgRNA | |
| 37 | | | (SEQ ID NO: 376) | | |
| PL3412, R5933 | NNNNTTY (SEQ ID NO: 333) | NNNNYTY (SEQ ID NO: 339) | R5933 | sgRNA | |
| 37 | | | (SEQ ID NO: 377) | | |
| PL3413, R4873, | NNNNTTC (SEQ ID NO: 331) | NNNNTTC (SEQ ID NO: 331) | R4873 | crRNA | R4945 |
| R4945 | | | (SEQ ID NO: 89) | | (SEQ ID NO: 145) |
| 38 | | | | | |
| PL3413, R4874, | NNNNTTC (SEQ ID NO: 331) | NNNNTTC (SEQ ID NO: 331) | R4874 | crRNA | R4928 |
| R4928 | | | (SEQ ID NO: 90) | | (SEQ ID NO: 147) |
| 38 | | | | | |
| PL3413, R5867 | NNNTTCN (SEQ ID NO: 351) | NNNTTCN (SEQ ID NO: 351) | R5867 | sgRNA | |
| 38 | | | (SEQ ID NO: 374) | | |
| PL3413, R5868 | NNNNTTC (SEQ ID NO: 331) | NNNNTTY (SEQ ID NO: 333) | R5868 | sgRNA | |
| 38 | | | (SEQ ID NO: 375) | | |
| PL3413, R5925 | NNNNTTC (SEQ ID NO: 331) | NNNNTTC (SEQ ID NO: 331) | R5925 | sgRNA | |
| 38 | | | (SEQ ID NO: 376) | | |
| PL3413, R5931 | NNNNTTC (SEQ ID NO: 331) | NNNNTTC (SEQ ID NO: 331) | R5931 | sgRNA | |
| 38 | | | (SEQ ID NO: 378) | | |
| PL3413, R5932 | NNNNTTC (SEQ ID NO: 331) | NNNNTNY (SEQ ID NO: 330) | R5932 | sgRNA | |
| 38 | | | (SEQ ID NO: 379) | | |
| PL3414, R4873, | NNNTYCT (SEQ ID NO: 355) | NNNNNCT (SEQ ID NO: 317) | R4873 | crRNA | R4945 |
| R4945 | | | (SEQ ID NO: 89) | | (SEQ ID NO: 145) |
| 39 | | | | | |
| PL3414, R5867 | NNNNTYN (SEQ ID NO: 335) | NNNNNYN (SEQ ID NO: 321) | R5867 | sgRNA | |
| 39 | | | (SEQ ID NO: 374) | | |
| PL3414, R5868 | NNNNNNT (SEQ ID NO: 302) | NNNNNYT (SEQ ID NO: 323) | R5868 | sgRNA | |
| 39 | | | (SEQ ID NO: 375) | | |
| PL3414, R5925 | NNNNNYT (SEQ ID NO: 323) | NNNNNYT (SEQ ID NO: 323) | R5925 | sgRNA | |
| 39 | | | (SEQ ID NO: 376) | | |
| PL3414, R5929 | NNNCTTN (SEQ ID NO: 306) | | R5929 | sgRNA | |
| 39 | | | (SEQ ID NO: 380) | | |
| PL3414, R5930 | NNNTYYT (SEQ ID NO: 359) | NNNNNYT (SEQ ID NO: 323) | R5930 | sgRNA | |
| 39 | | | (SEQ ID NO: 381) | | |
| PL3415, R5867 | NNNNNYN (SEQ ID NO: 321) | NNNNNYN (SEQ ID NO: 321) | R5867 | sgRNA | |
| 40 | | | (SEQ ID NO: 374) | | |
| PL3416, R4873, | NNNNNYT (SEQ ID NO: 323) | NNNNNNT (SEQ ID NO: 302) | R4873 | crRNA | R4945 |
| R4945 | | | (SEQ ID NO: 89) | | (SEQ ID NO: 145) |
| 41 | | | | | |
| PL3416, R4874, | NNNNNYT (SEQ ID NO: 323) | NNNNNNT (SEQ ID NO: 302) | R4874 | crRNA | R4928 |
| R4928 | | | (SEQ ID NO: 90) | | (SEQ ID NO: 147) |
| 41 | | | | | |
| PL3416, R5867 | NNNWNCT (SEQ ID NO: | NNNNNCT (SEQ ID NO: 317) | R5867 | sgRNA | |
| 41 | 358) | | (SEQ ID NO: 374) | | |
| PL3417, R4873, | NNNNTTC (SEQ ID NO: 331) | NNNNTTY (SEQ ID NO: 333) | R4873 | crRNA | R4945 |
| R4945 | | | (SEQ ID NO: 89) | | (SEQ ID NO: 145) |
| 42 | | | | | |
| PL3417, R4874, | NNNNTTC (SEQ ID NO: 331) | NNNNTTY (SEQ ID NO: 333) | R4874 | crRNA | R4928 |
| R4928 | | | (SEQ ID NO: 90) | | (SEQ ID NO: 147) |
| 42 | | | | | |
| PL3417, R5867 | NNNTTTN (SEQ ID NO: 353) | NNNTTYN (SEQ ID NO: 354) | R5867 | sgRNA | |
| 42 | | | (SEQ ID NO: 374) | | |
| PL3417, R5868 | NNNTYYW (SEQ ID NO: | NNNNTYN (SEQ ID NO: 335) | R5868 | sgRNA | |
| 42 | 357) | | (SEQ ID NO: 375) | | |
| PL3417, R5925 | NNNTYYN (SEQ ID NO: 356) | NNNNTTY (SEQ ID NO: 333) | R5925 | sgRNA | |
| 42 | | | (SEQ ID NO: 376) | | |
| PL3418, R4873, | NNNNTTC (SEQ ID NO: 331) | NNNNTTC (SEQ ID NO: 331) | R4873 | crRNA | R4945 |
| R4945 | | | (SEQ ID NO: 89) | | (SEQ ID NO: 145) |
| 43 | | | | | |
| PL3418, R4874, | NNNNTTC (SEQ ID NO: 331) | NNNNTTC (SEQ ID NO: 331) | R4874 | crRNA | R4928 |
| R4928 | | | (SEQ ID NO: 90) | | (SEQ ID NO: 147) |
| 43 | | | | | |
| PL3418, R5867 | NNNTTCN (SEQ ID NO: 351) | NNNTTCN (SEQ ID NO: 351) | R5867 | sgRNA | |
| 43 | | | (SEQ ID NO: 374) | | |
| PL3418, R5868 | NNNNTTC (SEQ ID NO: 331) | NNNNTTC (SEQ ID NO: 331) | R5868 | sgRNA | |
| 43 | | | (SEQ ID NO: 375) | | |
| PL3418, R5925 | NNNNTTC (SEQ ID NO: 331) | NNNNTTC (SEQ ID NO: 331) | R5925 | sgRNA | |
| 43 | | | (SEQ ID NO: 376) | | |
| PL4976, R5800 | NNNNCCR (SEQ ID NO: 313) | NNNNCCN (SEQ ID NO: 312) | R5800 | sgRNA | |
| 203 | | | (SEQ ID NO: 382) | | |
| PL4977, R5726, | NNNNCCN (SEQ ID NO: 312) | NNNNCCN (SEQ ID NO: 312) | R5726 | crRNA | R5783 |
| R5783 | | | (SEQ ID NO: 383) | | (SEQ ID NO: 384) |
| 209 | | | | | |
| PL4977, R5799 | NNNNCCN (SEQ ID NO: 312) | NNNNCCN (SEQ ID NO: 312) | R5799 | sgRNA | |
| 209 | | | (SEQ ID NO: 385) | | |
| PL4977, R5800 | NNNNCCN (SEQ ID NO: 312) | NNNNCCN (SEQ ID NO: 312) | R5800 | sgRNA | |
| 209 | | | (SEQ ID NO: 382) | | |
| PL4977, R5801 | NNNNCCR (SEQ ID NO: 313) | NNNNCCN (SEQ ID NO: 312) | R5801 | sgRNA | |
| 209 | | | (SEQ ID NO: 386) | | |
| PL4977, R5802 | NNNNCCN (SEQ ID NO: 312) | NNNNCCN (SEQ ID NO: 312) | R5802 | sgRNA | |
| 209 | | | (SEQ ID NO: 387) | | |
| PL3302, R5913 | | | R5913 | sgRNA | |
| 4 | | | (SEQ ID NO: 388) | | |
| PL3302, R5914 | | | R5914 | sgRNA | |
| 4 | | | (SEQ ID NO: 389) | | |
| PL3306, R5935 | NNNNTNN (SEQ ID NO: 329) | | R5935 | sgRNA | |
| 5 | | | (SEQ ID NO: 390) | | |
| PL3306, R5936 | NNNNTTY (SEQ ID NO: 333) | NNNNTYC (SEQ ID NO: 334) | R5936 | sgRNA | |
| 5 | | | (SEQ ID NO: 391) | | |
| PL3310, R5959 | | | R5959 | sgRNA | |
| 28 | | | (SEQ ID NO: 392) | | |
| PL3310, R5960 | | | R5960 | sgRNA | |
| 28 | | | (SEQ ID NO: 393) | | |
| PL3310, R5961 | | | R5961 | sgRNA | |
| 28 | | | (SEQ ID NO: 394) | | |
| PL3310, R5962 | | | R5962 | sgRNA | |
| 28 | | | (SEQ ID NO: 395) | | |
| PL3310, R5963 | | | R5963 | sgRNA | |
| 28 | | | (SEQ ID NO: 396) | | |
| PL3310, R5964 | | | R5964 | sgRNA | |
| 28 | | | (SEQ ID NO: 397) | | |
| PL3310, R5965 | | | R5965 | sgRNA | |
| 28 | | | (SEQ ID NO: 398) | | |
| PL3310, R5977 | | | R5977 | sgRNA | |
| 28 | | | (SEQ ID NO: 399) | | |
| PL3310, R5978 | | | R5978 | sgRNA | |
| 28 | | | (SEQ ID NO: 400) | | |
| PL3310, R5979 | | | R5979 | sgRNA | |
| 28 | | | (SEQ ID NO: 401) | | |
| PL3310, R5980 | | | R5980 | sgRNA | |
| 28 | | | (SEQ ID NO: 402) | | |
| PL3319, R4846, | NNNGNNN (SEQ ID NO: 307) | | R4846 | crRNA | R5947 |
| R5947 | | | (SEQ ID NO: 54) | | (SEQ ID NO: 403) |
| 9 | | | | | |
| PL3327, R4879, | NNNNCTT (SEQ ID NO: 314) | NNNNNTT (SEQ ID NO: 404) | R4879 | crRNA | R4935 |
| R4935 | | | (SEQ ID NO: 405) | | (SEQ ID NO: 91) |
| 1 | | | | | |
| PL3327, R5911 | | | R5911 | sgRNA | |
| 1 | | | (SEQ ID NO: 406) | | |
| PL3327, R5912 | | | R5912 | sgRNA | |
| 1 | | | (SEQ ID NO: 407) | | |
| PL3410, R4873, | NNNNTTC (SEQ ID NO: 331) | NNNNYTC (SEQ ID NO: 337) | R4873 | crRNA | R4945 |
| R4945 | | | (SEQ ID NO: 89) | | (SEQ ID NO: 145) |
| 35 | | | | | |
| PL3410, R4874, | NNNNTTC (SEQ ID NO: 331) | NNNNYWC (SEQ ID NO: | R4874 | crRNA | R4928 |
| R4928 | | 340) | (SEQ ID NO: 90) | | (SEQ ID NO: 147) |
| 35 | | | | | |
| PL3410, R5867 | NNNNTTC (SEQ ID NO: 331) | NNNTNYN (SEQ ID NO: 350) | R5867 | sgRNA | |
| 35 | | | (SEQ ID NO: 374) | | |
| PL3419, R4873, | | | R4873 | crRNA | R4945 |
| R4945 | | | (SEQ ID NO: 89) | | (SEQ ID NO: 145) |
| 44 | | | | | |
| PL3419, R5923 | | | R5923 | sgRNA | |
| 44 | | | (SEQ ID NO: 408) | | |
| PL3419, R5924 | | | R5924 | sgRNA | |
| 44 | | | (SEQ ID NO: 409) | | |
| PL3420, R5925 | | | R5925 | sgRNA | |
| 45 | | | (SEQ ID NO: 376) | | |
| PL3420, R5926 | | | R5926 | sgRNA | |
| 45 | | | (SEQ ID NO: 410) | | |
| PL3420, R5927 | | | R5927 | sgRNA | |
| 45 | | | (SEQ ID NO: 411) | | |
| PL3420, R5928 | | | R5928 | sgRNA | |
| 45 | | | (SEQ ID NO: 412) | | |
| PL3414, R4873, | NNNTYCT (SEQ ID NO: 355) | NNNNNCT (SEQ ID NO: 317) | R4873 | crRNA | R4945 |
| R4945 | | | (SEQ ID NO: 89) | | (SEQ ID NO: 145) |
| 39 | | | | | |
| PL3414, R5867 | NNNNTYN (SEQ ID NO: 335) | NNNNNYN (SEQ ID NO: 321) | R5867 | sgRNA | |
| 39 | | | (SEQ ID NO: 374) | | |
| PL3414, R5868 | NNNNNNT (SEQ ID NO: 302) | NNNNNYT (SEQ ID NO: 323) | R5868 | sgRNA | |
| 39 | | | (SEQ ID NO: 375) | | |
| PL3414, R5925 | NNNNNYT (SEQ ID NO: 323) | NNNNNYT (SEQ ID NO: 323) | R5925 | sgRNA | |
| 39 | | | (SEQ ID NO: 376) | | |
| PL3414, R5929 | NNNCTTN (SEQ ID NO: 306) | NNNCTTN (SEQ ID NO: 306) | R5929 | sgRNA | |
| 39 | | | (SEQ ID NO: 380) | | |
| PL3414, R5930 | NNNTYYT (SEQ ID NO: 359) | NNNNNYT (SEQ ID NO: 323) | R5930 | sgRNA | |
| 39 | | | (SEQ ID NO: 381) | | |
| PL3327, R4879, | NNNNCTT (SEQ ID NO: 314) | NNNNNTT (SEQ ID NO: 404) | R4879 | crRNA | R4935 |
| R4935 | | | (SEQ ID NO: 405) | | (SEQ ID NO: 91) |
| 1 | | | | | |

### Example 6: PAM Screening for D2S Effector Proteins

[1082] D2S effector proteins and guide RNA combinations were screened by in vitro enrichment (IVE) for PAM recognition. Effector proteins and guide RNAs were expressed and purified from E. coli. Briefly, effector proteins were complexed with corresponding guide RNAs for 15 minutes at 37° C. The complexes were added to an IVE reaction mix. PAM screening reactions used 10 μl of RNP in 100 μl reactions with 1,000 ng of a 5′ PAM library in 1× Cutsmart buffer and were carried out for 15 minutes at 25° C., 45 minutes at 37° C. and 15 minutes at 45° C. Reactions were terminated with 1 μl of proteinase K and 5 μl of 500 mM EDTA for 30 minutes at 37° C. Cis cleavage by each complex was confirmed by gel electrophoresis. Next generation sequencing was performed on cut sequences to confirm enriched PAMs. The PAM enrichment for the top 5% enrichment (PAM 5% in TABLE 14) generally had lower signal due to more noise than the 1% (PAM 1% in TABLE 14). In some cases, the 1% enrichment met the cutoff criteria, but the 5% enrichment did not. In such cases, a PAM is included for the 1% enrichment, but not the 5% enrichment. Complexes (e.g., the composition) and corresponding identified PAMs are provided in TABLE 14. Additionally, TABLE 14 also shows the effector protein Seq ID NO (under Enzyme Seq ID NO), and the cr/sgRNA designation number, tracr RNA designation number, and their corresponding sequences if applicable. FIGS. 7A-7E illustrate PAM preferences for the different D2S effector proteins used in this example. As shown in TABLE 14, the IVE assay revealed the presence of enriched 5′ PAM consensus sequences for the various D2S effector proteins.

TABLE 14
Compositions or D2S effector protein PAM screening

| | | | cr/sgRNA # | | tracrRNA# |
|---|---|---|---|---|---|
| Comp. Enzyme | | | cr/sgRNA Seq ID | | tracrRNA Seq ID |
| Seq ID NO. | PAM_1 % | PAM_5 % | NO. | cr/sgRNA | NO. |
| PL4967, R5727, | NNWTTYN (SEQ ID NO: | NNNNTYN (SEQ ID NO: 335) | R5727 | crRNA | R5786 |
| R5786 | 366) | | (SEQ ID NO: 413) | | (SEQ ID NO: 414) |
| 204 | | | | | |
| PL4968, R5728, | NNNTTTN (SEQ ID NO: | NNNNTTN (SEQ ID NO: 332) | R5728 | crRNA | R5788 |
| R5788 | 353) | | (SEQ ID NO: 415) | | (SEQ ID NO: 416) |
| 212 | | | | | |
| PL4970, R5730, | NNWWTTN (SEQ ID NO: | | R5730 | crRNA | R5791 |
| R5791 | 367) | | (SEQ ID NO: 417) | | (SEQ ID NO: 418) |
| 232 | | | | | |
| PL4970, R5730, | NNTTTYN (SEQ ID NO: | NNNNTYN (SEQ ID NO: 335) | R5730 | crRNA | R5792 |
| R5792 | 365) | | (SEQ ID NO: 417) | | (SEQ ID NO: 419) |
| 232 | | | | | |
| PL4980, R5691, | NRNNNNN (SEQ ID NO: | | R5691 | crRNA | R5814 |
| R5814 | 303) | | (SEQ ID NO: 420) | | (SEQ ID NO: 421) |
| 218 | | | | | |
| PL4988, R5697, | NNNNNNG (SEQ ID NO: | | R5697 | crRNA | R5831 |
| R5831 | 301) | | (SEQ ID NO: 422) | | (SEQ ID NO: 423) |
| 206 | | | | | |
| PL4988, R5697, | NNNTNTG (SEQ ID NO: | NNNNNTG (SEQ ID NO: 318) | R5697 | crRNA | R5847 |
| R5847 | 349) | | (SEQ ID NO: 422) | | (SEQ ID NO: 424) |
| 206 | | | | | |
| PL4988, R5869 | NNNTNTG (SEQ ID NO: | NNNNNTG (SEQ ID NO: 318) | R5869 | sgRNA | |
| 206 | 349) | | (SEQ ID NO: 425) | | |
| PL4988, R5873 | NNNTNTG (SEQ ID NO: | NNNNNTG (SEQ ID NO: 318) | R5873 | sgRNA | |
| 206 | 349) | | (SEQ ID NO: 426) | | |
| PL4989, R5698, | NNNWNTG (SEQ ID NO: | NNNNNTG (SEQ ID NO: 318) | R5698 | crRNA | R5832 |
| R5832 | 360) | | (SEQ ID NO: 427) | | (SEQ ID NO: 428) |
| 221 | | | | | |
| PL4989, R5698, | NNNWNTG (SEQ ID NO: | NNNNNTG (SEQ ID NO: 318) | R5698 | crRNA | R5848 |
| R5848 | 360) | | (SEQ ID NO: 427) | | (SEQ ID NO: 429) |
| 221 | | | | | |
| PL4990, R5699, | NNNTNTG (SEQ ID NO: | NNNNNYR (SEQ ID NO: 322) | R5699 | crRNA | R5833 |
| R5833 | 349) | | (SEQ ID NO: 430) | | (SEQ ID NO: 431) |
| 228 | | | | | |
| PL4990, R5699, | NNNWYTG (SEQ ID NO: | NNNNNTG (SEQ ID NO: 318) | R5699 | crRNA | R5833 |
| R5849 | 361) | | (SEQ ID NO: 430) | | (SEQ ID NO: 431) |
| 228 | | | | | |
| PL4990, R5699 | NNNWNTG (SEQ ID NO: | NNNNNTG (SEQ ID NO: 318) | R5699 | crRNA | R5849 |
| 228 | 360) | | (SEQ ID NO: 430) | | (SEQ ID NO: 432) |
| PL4990, R5870 | NNNWYTG (SEQ ID NO: | NNNNNTG (SEQ ID NO: 318) | R5870 | sgRNA | |
| 228 | 361) | | (SEQ ID NO: 433) | | |
| PL4990, R5874 | NNNWYTG (SEQ ID NO: | NNNNNTG (SEQ ID NO: 318) | R5874 | sgRNA | |
| 228 | 361) | | (SEQ ID NO: 434) | | |
| PL4991, R5700, | NNNTNTG (SEQ ID NO: | NNNNNTG (SEQ ID NO: 318) | R5700 | crRNA | R5834 |
| R5834 | 349) | | (SEQ ID NO: 435) | | (SEQ ID NO: 436) |
| 233 | | | | | |
| PL4991, R5700, | NNNWNTG (SEQ ID NO: | NNNNNTG (SEQ ID NO: 318) | R5700 | crRNA | R5850 |
| R5850 | 360) | | (SEQ ID NO: 435) | | (SEQ ID NO: 437) |
| 233 | | | | | |
| PL4992, R5702, | NNNRTRG (SEQ ID NO: | NNNNNNG (SEQ ID NO: 301) | R5702 | crRNA | R5846 |
| R5846 | 343) | | (SEQ ID NO: 438) | | (SEQ ID NO: 439) |
| 240 | | | | | |
| PL4992, R5702, | NNNRTRG (SEQ ID NO: | NNNNNNG (SEQ ID NO: 301) | R5702 | crRNA | R5861 |
| R5861 | 343) | | (SEQ ID NO: 438) | | (SEQ ID NO: 440) |
| 240 | | | | | |
| PL4994, R5835 | NNKRTTN (SEQ ID NO: | NNNNTTN (SEQ ID NO: 332) | R5835 | sgRNA | |
| 202 | 305) | | (SEQ ID NO: 441) | | |
| PL4994, R5851 | NNKRTTN (SEQ ID NO: | | R5851 | sgRNA | |
| 202 | 305) | | (SEQ ID NO: 442) | | |
| PL4995, R5836 | NNNRTTN (SEQ ID NO: | NNNRTTN (SEQ ID NO: 345) | R5836 | sgRNA | |
| 205 | 345) | | (SEQ ID NO: 443) | | |
| PL4995, R5852 | NNNRTTN (SEQ ID NO: | NNNRTTN (SEQ ID NO: 345) | R5852 | sgRNA | |
| 205 | 345) | | (SEQ ID NO: 444) | | |
| PL4997, R5838 | NNNRTWG (SEQ ID NO: | NNNRTTG (SEQ ID NO: 344) | R5838 | sgRNA | |
| 208 | 346) | | (SEQ ID NO: 445) | | |
| PL4997, R5854 | NNNRTWG (SEQ ID NO: | NNNRTTG (SEQ ID NO: 344) | R5854 | sgRNA | |
| 208 | 346) | | (SEQ ID NO: 446) | | |
| PL4998, R5871 | NNRGTYG (SEQ ID NO: | NNNGTYN (SEQ ID NO: 309) | R5871 | sgRNA | |
| 213 | 363) | | (SEQ ID NO: 447) | | |
| PL4998, R5876 | NNNGTYG (SEQ ID NO: | NNNGTYN (SEQ ID NO: 309) | R5876 | sgRNA | |
| 213 | 308) | | (SEQ ID NO: 448) | | |
| PL4999, R5840 | NNNRTNG (SEQ ID NO: | NNNRNNG (SEQ ID NO: 341) | R5840 | sgRNA | |
| 216 | 342) | | (SEQ ID NO: 449) | | |
| PL4999, R5855 | NNNRTNG (SEQ ID NO: | NNNRNNG (SEQ ID NO: 341) | R5855 | sgRNA | |
| 216 | 342) | | (SEQ ID NO: 450) | | |
| PL5000, R5841 | NNNRTTN (SEQ ID NO: | NNNRTTN (SEQ ID NO: 345) | R5841 | sgRNA | |
| 217 | 345) | | (SEQ ID NO: 451) | | |
| PL5000, R5856 | NNNRTTN (SEQ ID NO: | NNNRTTN (SEQ ID NO: 345) | R5856 | sgRNA | |
| 217 | 345) | | (SEQ ID NO: 452) | | |
| PL5001, R5842 | NNNTNCG (SEQ ID NO: | NNNNNCG (SEQ ID NO: 316) | R5842 | sgRNA | |
| 220 | 348) | | (SEQ ID NO: 453) | | |
| PL5001, R5842 | NNNTKCG (SEQ ID NO: | NNNNNCG (SEQ ID NO: 316) | R5842 | sgRNA | |
| 220 | 347) | | (SEQ ID NO: 453) | | |
| PL5001, R5857 | NNNTKCG (SEQ ID NO: | NNNNNCG (SEQ ID NO: 316) | R5857 | sgRNA | |
| 220 | 347) | | (SEQ ID NO: 454) | | |
| PL5002, R5843 | NNNRTRG (SEQ ID NO: | | R5843 | sgRNA | |
| 225 | 343) | | (SEQ ID NO: 455) | | |
| PL5002, R5858 | NNNRTRG (SEQ ID NO: | NNNNNNG (SEQ ID NO: 301) | R5858 | sgRNA | |
| 225 | 343) | | (SEQ ID NO: 456) | | |
| PL5003, R5844 | NNNNTCG (SEQ ID NO: | NNNNNCG (SEQ ID NO: 316) | R5844 | sgRNA | |
| 229 | 325) | | (SEQ ID NO: 457) | | |
| PL5003, R5859 | NNNNTCG (SEQ ID NO: | NNNNNCG (SEQ ID NO: 316) | R5859 | sgRNA | |
| 229 | 325) | | (SEQ ID NO: 458) | | |
| PL5004, R5683, | NNNYTTR (SEQ ID NO: | NNNNTYR (SEQ ID NO: 336) | R5683 | crRNA | R5807 |
| R5807 | 362) | | (SEQ ID NO: 459) | | (SEQ ID NO: 460) |
| 210 | | | | | |
| PL5004, R5867 | NNNTTYN (SEQ ID NO: | NNNNNYN (SEQ ID NO: 321) | R5867 | sgRNA | |
| 210 | 354) | | (SEQ ID NO: 374) | | |
| PL5005, R5684, | NNNNTTC (SEQ ID NO: | | R5684 | crRNA | R5808 |
| R5808 | 331) | | (SEQ ID NO: 461) | | (SEQ ID NO: 462) |
| 234 | | | | | |
| PL5005, R5868 | NNNTTNY (SEQ ID NO: | NNNTTNY (SEQ ID NO: 352) | R5868 | sgRNA | |
| 234 | 352) | | (SEQ ID NO: 375) | | |
| PL3302, R5913 | NNNNTTC (SEQ ID NO: | NNNNTTC (SEQ ID NO: 331) | R5913 | sgRNA | |
| 4 | 331) | | (SEQ ID NO: 388) | | |
| PL3302, R5913 | NNNNTTC (SEQ ID NO: | NNNNTTC (SEQ ID NO: 331) | R5913 | sgRNA | |
| 4 | 331) | | (SEQ ID NO: 388) | | |
| PL3420, R5926 | NNNNNTY (SEQ ID NO: | NNNNTTY (SEQ ID NO: 333) | R5926 | sgRNA | |
| 45 | 320) | | (SEQ ID NO: 411) | | |

### Example 7: DETECTR Activity of D2S Effector Proteins

[1083] D2S effector proteins were tested for trans cleavage. Briefly, partially purified (nickel-NTA purified) D2S effector proteins were incubated with crRNA and tracrRNA or sgRNAs in a trans cleavage buffer (20 mM Tricine, 15 mM MgCl2, 0.2 mg/ml BSA, 1 mM TCEP (pH 9 at 37° C.) at room temperature for 20 minutes, followed by addition of target nucleic acid at a final concentration of 10 nM to produce effector-protein guide complexes. The components of the effector-protein guide complexes that were assayed are provided in TABLE 15, which shows the composition of each experiment, the effector Enzyme SEQ ID NO, and the cr/sgRNA designation number, tracr RNA designation number, and their corresponding sequences if applicable. Trans cleavage activity was detected by fluorescence signal upon cleavage of a fluorophore-quencher reporter (200 nM) in a DETECTR reaction, fluorescence activity is shown under FC max rate in TABLE 15, which indicates the maximum rate of fluorescence generated over the course of the DETECTR reaction. Dilutions were of the effector-protein guide complexes were performed, and the assay repeated at 1%, 0.1% or 0.01% of the original protein concentration. The dilution that provided the highest signal ratio is listed in TABLE 15.

TABLE 15
Compositions for D2S effector protein PAM screening

| | FC max | P | Enzyme | cr/sgRNA | | tracrRNA |
|---|---|---|---|---|---|---|
| Composition | rate | value | Seq ID NO | sequence | cr/sgRNA | sequence |
| PL5006, | 2 | 0.025 | 223 | R5804 (SEQ ID | sgRNA | |
| R5804 | | | | NO: 463) | | |
| PL5007, | 2.5 | 0.016 | 224 | R5705 (SEQ ID | crRNA | R5875 (SEQ ID |
| R5705, | | | | NO: 464) | | NO: 465) |
| R5875 | | | | | | |
| PL5022, | 2.24 | 0.040 | 214 | R5772 (SEQ ID | sgRNA | |
| R5772 | | | | NO: 466) | | |

### Example 8: D2S Enzyme Edit Genomic DNA in Mammalian Cells

[1084] D2S effectors were tested for their ability to produce indels in HEK293T cells. Briefly, 150 ng nuclease and 150 ng gRNA carrying plasmids were delivered by lipofection to HEK293T cells in 96 well plates. TransIT-293 reagent was diluted with warmed up OPTIMEM and mixed with the plasmid DNA at the ratio of 2:1 lipid:DNA. Lipid:DNA mixture were incubated for 10 minutes at room temperature before adding 20 μL of the lipid:DNA optimem mixture to each well. Cells were incubated for 3 days before being lysed and subjected to PCR amplification. TABLE 16 shows the constructs (e.g., composition) test and their indel percent in HEK293T cells. Additionally, TABLE 16 also shows the PAM 1% enrichment sequence, the effector protein Seq ID NO (under Enzyme Seq ID NO), and the sgRNA sequence if applicable.

[1085] Indels were detected by next generation sequencing of PCR amplicons at the targeted loci and indel percentage was calculated as the fraction of sequencing reads containing insertions or deletions relative to an unedited reference sequence. Sequencing libraries with less than 20% of reads aligning to the reference sequence were excluded from the analysis for quality control purposes. “No plasmid” included as negative respectively. TABLE 16 shows the results of this experiment. The results in TABLE 16 show the D2S enzymes had nuclease activity.

TABLE 16
Indels by D2S effectors

| Composition | | Indel | sgRNA SEQ ID |
|---|---|---|---|
| Enzyme SEQ ID NO: | PAM 1% | percent | NO: |
| PL5614, PL6521 | NTCG (SEQ ID NO: 369) | 0.11 | SEQ ID NO: 180 |
| 202 | | | |
| PL5614, PL6522 | RTTR (SEQ ID NO: 370) | 0.14 | SEQ ID NO: 467 |
| 202 | | | |
| PL5616, PL6522 | RTTR (SEQ ID NO: 370) | 0.74 | SEQ ID NO: 467 |
| 208 | | | |
| PL5618, PL6522 | RTTR (SEQ ID NO: 370) | 1.70 | SEQ ID NO: 467 |
| 25 | | | |
| PL5619, PL6522 | RTTR (SEQ ID NO: 370) | 5.09 | SEQ ID NO: 467 |
| 28 | | | |
| PL5620, PL6522 | RTTR (SEQ ID NO: 370) | 0.46 | SEQ ID NO: 467 |
| 217 | | | |
| PL5621, PL6522 | RTTR (SEQ ID NO: 370) | 3.89 | SEQ ID NO: 467 |
| 219 | | | |
| PL5622, PL6521 | NTCG (SEQ ID NO: 369) | 1.58 | SEQ ID NO: 180 |
| 236 | | | |
| PL5622, PL6522 | RTTR (SEQ ID NO: 370) | 1.36 | SEQ ID NO: 467 |
| 236 | | | |
| PL5623, PL6522 | RTTR (SEQ ID NO: 370) | 1.04 | SEQ ID NO: 467 |
| 237 | | | |
| PL5624, PL6522 | RTTR (SEQ ID NO: 370) | 0.13 | SEQ ID NO: 467 |
| 29 | | | |
| PL5625, PL6521 | NTCG (SEQ ID NO: 369) | 0.33 | SEQ ID NO: 180 |
| 30 | | | |
| PL5627, PL6521 | NTCG (SEQ ID NO: 369) | 0.86 | SEQ ID NO: 180 |
| 32 | | | |

### Example 9: D2S Enzyme Edit Genomic DNA in Mammalian Cells

[1086] Enzymes were tested for their ability to produce indels in HEK293T cells. Briefly, plasmids encoding the enzymes and guide RNAs were delivered by lipofection to HEK293T cells. Cells were incubated for approximately 48 hours before being lysed. Indels were detected by next generation sequencing of PCR amplicons at the targeted loci and indel percentage was calculated as the fraction of sequencing reads containing insertions or deletions relative to an unedited reference sequence. Sequencing libraries with less than 20% of reads aligning to the reference sequence were excluded from the analysis for quality control purposes. “No plasmid” and SpyCas9 were included as negative and positive controls, respectively. TABLE 17 describes the sequences of the single guide RNAs tested and percent of reads with indels. Additionally, TABLE 17 shows the compositions tested, the PAM 1% enrichment sequence, the effector protein Seq ID NO (under Enzyme Seq ID NO), and the sgRNA sequence if applicable. The results in TABLE 17 show the D2S enzymes had nuclease activity.

TABLE 17
Indels by D2S effectors

| Comp. | | Indel | sgRNA SEQ ID |
|---|---|---|---|
| Enzyme SEQ ID NO: | PAM 1% | percent | NO: |
| PL5995 | TNTG (SEQ ID NO: 368) | 21.36 | SEQ ID NO: 468 |
| 228 | | | |
| PL7302 | NTCG (SEQ ID NO: 369) | 7.90 | SEQ ID NO: 469 |
| 238 | | | |
| PL7319 | NTCG (SEQ ID NO: 369) | 6.94 | SEQ ID NO: 470 |
| 238 | | | |
| PL7303 | NTCG (SEQ ID NO: 369) | 1.44 | SEQ ID NO: 471 |
| 238 | | | |
| PL7309 | NTCG (SEQ ID NO: 369) | 1.37 | SEQ ID NO: 472 |
| 238 | | | |
| PL6239 | NTTC (SEQ ID NO: 371) | 1.43 | SEQ ID NO: 473 |
| 45 | | | |
| PL6246 | NTTC (SEQ ID NO: 371) | 0.90 | SEQ ID NO: 473 |
| 45 | | | |
| PL6243 | NTTC (SEQ ID NO: 371) | 0.29 | SEQ ID NO: 474 |
| 45 | | | |
| PL6237 | NTTC (SEQ ID NO: 371) | 0.21 | SEQ ID NO: 475 |
| 45 | | | |
| PL7375 | RTTR (SEQ ID NO: 370) | 0.70 | SEQ ID NO: 476 |
| 30 | | | |
| PL6412 | NTTC (SEQ ID NO: 371) | 0.95 | SEQ ID NO: 477 |
| 38 | | | |
| PL6414 | NTTC (SEQ ID NO: 371) | 0.70 | SEQ ID NO: 478 |
| 38 | | | |
| PL6417 | NTTC (SEQ ID NO: 371) | 0.13 | SEQ ID NO: 479 |
| 38 | | | |
| PL7399 | RTTR (SEQ ID NO: 370) | 0.70 | SEQ ID NO: 476 |
| 229 | | | |
| PL7420 | RTTR (SEQ ID NO: 370) | 0.60 | SEQ ID NO: 480 |
| 229 | | | |
| PL7328 | RTTR (SEQ ID NO: 370) | 0.69 | SEQ ID NO: 481 |
| 222 | | | |

### Example 10: CasM19952 Edits Genomic DNA in Mammalian Cells with Multiple sgRNA

[1087] D2S effectors were tested for their ability to produce indels in HEK293T cells. Briefly, 150 ng nuclease and 150 ng gRNA carrying plasmids were delivered by lipofection to HEK293T cells in 96 well plates. TransIT-293 reagent was diluted with warmed up OPTIMEM and mixed with the plasmid DNA at the ratio of 2:1 lipid:DNA. Lipid:DNA mixture were incubated for 10 minutes at room temperature before adding 20 μL of the lipid:DNA optimem mixture to each well. Cells were incubated for 3 days before being lysed and subjected to PCR amplification. TABLE 18 shows the constructs (e.g., composition) test and their indel percent in HEK293T cells. Additionally, TABLE 18 also shows the effector protein Seq ID NO (under Enzyme Seq ID NO), and the sgRNA sequence if applicable. The PAM 1% enrichment sequence for this experiment was NTCG (SEQ ID NO: 369).

[1088] Indels were detected by next generation sequencing of PCR amplicons at the targeted loci and indel percentage was calculated as the fraction of sequencing reads containing insertions or deletions relative to an unedited reference sequence. Sequencing libraries with less than 20% of reads aligning to the reference sequence were excluded from the analysis for quality control purposes. “No plasmid” and SpyCas9 were included as negative and positive controls, respectively. TABLE 18 shows the results of this experiment. The results in TABLE 18 show the D2S enzymes had nuclease activity.

TABLE 18
Indels by CasM19952

| Comp. | | |
|---|---|---|
| Enzyme SEQ ID NO: | Indel percent | sgRNA SEQ ID NO: |
| PL5879, PL3651 | 0.104 | SEQ ID NO: 482 |
| 23 | | |
| PL5876, PL3651 | 0.111 | SEQ ID NO: 483 |
| 23 | | |
| PL5680, PL3651 | 0.111 | SEQ ID NO: 484 |
| 23 | | |
| PL5680, PL3651 | 0.111 | SEQ ID NO: 484 |
| 23 | | |
| PL5691, PL3651 | 0.120 | SEQ ID NO: 485 |
| 23 | | |
| PL5680, PL3651 | 0.122 | SEQ ID NO: 484 |
| 23 | | |
| PL5674, PL3651 | 0.125 | SEQ ID NO: 486 |
| 23 | | |
| PL5873, PL3651 | 0.133 | SEQ ID NO: 487 |
| 23 | | |
| PL5670, PL3651 | 0.138 | SEQ ID NO: 488 |
| 23 | | |
| PL5874, PL3651 | 0.140 | SEQ ID NO: 489 |
| 23 | | |
| PL5690, PL3651 | 0.142 | SEQ ID NO: 490 |
| 23 | | |
| PL5688, PL3651 | 0.142 | SEQ ID NO: 491 |
| 23 | | |
| PL5679, PL3651 | 0.149 | SEQ ID NO: 492 |
| 23 | | |
| PL5668, PL3651 | 0.153 | SEQ ID NO: 493 |
| 23 | | |
| PL5682, PL3651 | 0.161 | SEQ ID NO: 494 |
| 23 | | |
| PL5685, PL3651 | 0.162 | SEQ ID NO: 495 |
| 23 | | |
| PL5682, PL3651 | 0.177 | SEQ ID NO: 494 |
| 23 | | |
| PL5878, PL3651 | 0.182 | SEQ ID NO: 496 |
| 23 | | |
| PL5875, PL3651 | 0.186 | SEQ ID NO: 497 |
| 23 | | |
| PL5873, PL3651 | 0.190 | SEQ ID NO: 487 |
| 23 | | |
| PL5690, PL3651 | 0.200 | SEQ ID NO: 490 |
| 23 | | |
| PL5690, PL3651 | 0.225 | SEQ ID NO: 490 |
| 23 | | |
| PL5875, PL3651 | 0.231 | SEQ ID NO: 497 |
| 23 | | |
| PL5686, PL3651 | 0.241 | SEQ ID NO: 498 |
| 23 | | |
| PL5678, PL3651 | 0.245 | SEQ ID NO: 499 |
| 23 | | |
| PL5685, PL3651 | 0.270 | SEQ ID NO: 495 |
| 23 | | |
| PL5679, PL3651 | 0.276 | SEQ ID NO: 492 |
| 23 | | |
| PL5877, PL3651 | 0.298 | SEQ ID NO: 500 |
| 23 | | |
| PL5689, PL3651 | 0.315 | SEQ ID NO: 501 |
| 23 | | |
| PL5875, PL3651 | 0.326 | SEQ ID NO: 497 |
| 23 | | |
| PL5685, PL3651 | 0.343 | SEQ ID NO: 495 |
| 23 | | |
| PL5877, PL3651 | 0.355 | SEQ ID NO: 500 |
| 23 | | |
| PL5877, PL3651 | 0.367 | SEQ ID NO: 500 |
| 23 | | |
| PL5880, PL3651 | 0.409 | SEQ ID NO: 502 |
| 23 | | |
| PL5689, PL3651 | 0.421 | SEQ ID NO: 501 |
| 23 | | |
| PL5880, PL3651 | 0.440 | SEQ ID NO: 502 |
| 23 | | |
| PL5682, PL3651 | 0.448 | SEQ ID NO: 494 |
| 23 | | |
| PL5881, PL3651 | 0.450 | SEQ ID NO: 503 |
| 23 | | |
| PL5689, PL3651 | 0.453 | SEQ ID NO: 501 |
| 23 | | |
| PL5669, PL3651 | 0.467 | SEQ ID NO: 504 |
| 23 | | |
| PL5694, PL3651 | 0.520 | SEQ ID NO: 505 |
| 23 | | |
| PL5881, PL3651 | 0.601 | SEQ ID NO: 503 |
| 23 | | |
| PL5669, PL3651 | 0.617 | SEQ ID NO: 504 |
| 23 | | |
| PL5694, PL3651 | 0.639 | SEQ ID NO: 505 |
| 23 | | |
| PL5881, PL3651 | 0.656 | SEQ ID NO: 503 |
| 23 | | |
| PL5683, PL3651 | 0.658 | SEQ ID NO: 506 |
| 23 | | |
| PL5683, PL3651 | 0.665 | SEQ ID NO: 506 |
| 23 | | |
| PL5673, PL3651 | 0.669 | SEQ ID NO: 507 |
| 23 | | |
| PL5693, PL3651 | 0.681 | SEQ ID NO: 508 |
| 23 | | |
| PL5673, PL3651 | 0.681 | SEQ ID NO: 507 |
| 23 | | |
| PL5694, PL3651 | 0.684 | SEQ ID NO: 505 |
| 23 | | |
| PL5684, PL3651 | 0.704 | SEQ ID NO: 509 |
| 23 | | |
| PL5683, PL3651 | 0.710 | SEQ ID NO: 506 |
| 23 | | |
| PL5669, PL3651 | 0.713 | SEQ ID NO: 504 |
| 23 | | |
| PL5681, PL3651 | 0.723 | SEQ ID NO: 510 |
| 23 | | |
| PL5673, PL3651 | 0.736 | SEQ ID NO: 507 |
| 23 | | |
| PL5681, PL3651 | 0.738 | SEQ ID NO: 510 |
| 23 | | |
| PL5671, PL3651 | 0.748 | SEQ ID NO: 511 |
| 23 | | |
| PL5684, PL3651 | 0.761 | SEQ ID NO: 509 |
| 23 | | |
| PL5671, PL3651 | 0.800 | SEQ ID NO: 511 |
| 23 | | |
| PL5681, PL3651 | 0.850 | SEQ ID NO: 510 |
| 23 | | |
| PL5693, PL3651 | 0.924 | SEQ ID NO: 508 |
| 23 | | |
| PL5671, PL3651 | 0.945 | SEQ ID NO: 511 |
| 23 | | |
| PL5684, PL3651 | 1.041 | SEQ ID NO: 509 |
| 23 | | |
| PL5693, PL3651 | 1.053 | SEQ ID NO: 508 |
| 23 | | |
| PL5880, PL3651 | 1.513 | SEQ ID NO: 502 |
| 23 | | |
| PL5677, PL3651 | 2.340 | SEQ ID NO: 512 |
| 23 | | |
| PL5677, PL3651 | 2.377 | SEQ ID NO: 512 |
| 23 | | |
| PL5677, PL3651 | 2.613 | SEQ ID NO: 512 |
| 23 | | |
| PL5672, PL3651 | 2.630 | SEQ ID NO: 513 |
| 23 | | |
| PL5672, PL3651 | 2.861 | SEQ ID NO: 513 |
| 23 | | |
| PL5672, PL3651 | 3.629 | SEQ ID NO: 513 |
| 23 | | |
| PL5687, PL3651 | 4.047 | SEQ ID NO: 514 |
| 23 | | |
| PL5687, PL3651 | 4.083 | SEQ ID NO: 514 |
| 23 | | |
| PL5687, PL3651 | 4.211 | SEQ ID NO: 514 |
| 23 | | |
| PL5785, PL3651 | 4.762 | SEQ ID NO: 515 |
| 23 | | |
| PL5857, PL3651 | 8.796 | SEQ ID NO: 516 |
| 23 | | |
| PL5857, PL3651 | 8.869 | SEQ ID NO: 516 |
| 23 | | |
| PL5857, PL3651 | 9.317 | SEQ ID NO: 516 |
| 23 | | |
| PL5869, PL3651 | 10.779 | SEQ ID NO: 517 |
| 23 | | |
| PL5869, PL3651 | 11.648 | SEQ ID NO: 517 |
| 23 | | |
| PL5869, PL3651 | 11.715 | SEQ ID NO: 517 |
| 23 | | |
| PL5809, PL3651 | 12.082 | SEQ ID NO: 518 |
| 23 | | |
| PL5809, PL3651 | 12.323 | SEQ ID NO: 518 |
| 23 | | |
| PL5746, PL3651 | 12.385 | SEQ ID NO: 519 |
| 23 | | |
| PL5785 , PL3651 | 12.772 | SEQ ID NO: 515 |
| 23 | | |
| PL5746, PL3651 | 12.795 | SEQ ID NO: 519 |
| 23 | | |
| PL5821, PL3651 | 13.028 | SEQ ID NO: 520 |
| 23 | | |
| PL5675, PL3651 | 13.042 | SEQ ID NO: 521 |
| 23 | | |
| PL5695, PL3651 | 13.171 | SEQ ID NO: 522 |
| 23 | | |
| PL5809, PL3651 | 13.360 | SEQ ID NO: 518 |
| 23 | | |
| PL5695, PL3651 | 13.374 | SEQ ID NO: 522 |
| 23 | | |
| PL5785, PL3651 | 13.415 | SEQ ID NO: 515 |
| 23 | | |
| PL5675, PL3651 | 13.541 | SEQ ID NO: 521 |
| 23 | | |
| PL5695, PL3651 | 13.558 | SEQ ID NO: 522 |
| 23 | | |
| PL5696, PL3651 | 13.690 | SEQ ID NO: 523 |
| 23 | | |
| PL5675, PL3651 | 13.691 | SEQ ID NO: 521 |
| 23 | | |
| PL5821, PL3651 | 13.959 | SEQ ID NO: 520 |
| 23 | | |
| PL5821, PL3651 | 14.008 | SEQ ID NO: 520 |
| 23 | | |
| PL5696, PL3651 | 14.387 | SEQ ID NO: 523 |
| 23 | | |
| PL5696, PL3651 | 14.427 | SEQ ID NO: 523 |
| 23 | | |
| PL5746, PL3651 | 14.455 | SEQ ID NO: 519 |
| 23 | | |
| PL5813, PL3651 | 14.671 | SEQ ID NO: 524 |
| 23 | | |
| PL5788, PL3651 | 14.932 | SEQ ID NO: 525 |
| 23 | | |
| PL5788, PL3651 | 14.947 | SEQ ID NO: 525 |
| 23 | | |
| PL5788, PL3651 | 15.031 | SEQ ID NO: 525 |
| 23 | | |
| PL5743, PL3651 | 15.306 | SEQ ID NO: 526 |
| 23 | | |
| PL5817, PL3651 | 15.431 | SEQ ID NO: 527 |
| 23 | | |
| PL5787, PL3651 | 15.780 | SEQ ID NO: 528 |
| 23 | | |
| PL5825, PL3651 | 15.781 | SEQ ID NO: 529 |
| 23 | | |
| PL5745, PL3651 | 16.012 | SEQ ID NO: 530 |
| 23 | | |
| PL5825, PL3651 | 16.080 | SEQ ID NO: 529 |
| 23 | | |
| PL5787, PL3651 | 16.133 | SEQ ID NO: 528 |
| 23 | | |
| PL5745, PL3651 | 16.234 | SEQ ID NO: 530 |
| 23 | | |
| PL5813, PL3651 | 16.242 | SEQ ID NO: 524 |
| 23 | | |
| PL5787, PL3651 | 16.243 | SEQ ID NO: 528 |
| 23 | | |
| PL5813, PL3651 | 16.299 | SEQ ID NO: 524 |
| 23 | | |
| PL5745, PL3651 | 16.379 | SEQ ID NO: 530 |
| 23 | | |
| PL5817, PL3651 | 16.437 | SEQ ID NO: 527 |
| 23 | | |
| PL5825, PL3651 | 17.232 | SEQ ID NO: 529 |
| 23 | | |
| PL5837, PL3651 | 17.270 | SEQ ID NO: 531 |
| 23 | | |
| PL5748, PL3651 | 17.325 | SEQ ID NO: 532 |
| 23 | | |
| PL5697, PL3651 | 17.376 | SEQ ID NO: 533 |
| 23 | | |
| PL5748, PL3651 | 17.397 | SEQ ID NO: 532 |
| 23 | | |
| PL5841, PL3651 | 17.403 | SEQ ID NO: 534 |
| 23 | | |
| PL5737, PL3651 | 17.410 | SEQ ID NO: 180 |
| 23 | | |
| PL5740, PL3651 | 17.422 | SEQ ID NO: 535 |
| 23 | | |
| PL5739, PL3651 | 17.476 | SEQ ID NO: 536 |
| 23 | | |
| PL5739, PL3651 | 17.507 | SEQ ID NO: 536 |
| 23 | | |
| PL5739, PL3651 | 17.567 | SEQ ID NO: 536 |
| 23 | | |
| PL5744, PL3651 | 17.667 | SEQ ID NO: 537 |
| 23 | | |
| PL5817, PL3651 | 17.743 | SEQ ID NO: 527 |
| 23 | | |
| PL5740, PL3651 | 17.800 | SEQ ID NO: 535 |
| 23 | | |
| PL5742, PL3651 | 17.891 | SEQ ID NO: 538 |
| 23 | | |
| PL5737, PL3651 | 17.985 | SEQ ID NO: 180 |
| 23 | | |
| PL5697, PL3651 | 18.004 | SEQ ID NO: 533 |
| 23 | | |
| PL5740, PL3651 | 18.009 | SEQ ID NO: 535 |
| 23 | | |
| PL5845, PL3651 | 18.138 | SEQ ID NO: 539 |
| 23 | | |
| PL5744, PL3651 | 18.142 | SEQ ID NO: 537 |
| 23 | | |
| PL5743, PL3651 | 18.158 | SEQ ID NO: 526 |
| 23 | | |
| PL5789, PL3651 | 18.162 | SEQ ID NO: 540 |
| 23 | | |
| PL5829, PL3651 | 18.319 | SEQ ID NO: 541 |
| 23 | | |
| PL5743, PL3651 | 18.573 | SEQ ID NO: 526 |
| 23 | | |
| PL5829, PL3651 | 18.654 | SEQ ID NO: 541 |
| 23 | | |
| PL5738, PL3651 | 18.716 | SEQ ID NO: 542 |
| 23 | | |
| PL5845, PL3651 | 18.796 | SEQ ID NO: 539 |
| 23 | | |
| PL5837, PL3651 | 18.832 | SEQ ID NO: 531 |
| 23 | | |
| PL5829, PL3651 | 18.903 | SEQ ID NO: 541 |
| 23 | | |
| PL5697, PL3651 | 18.935 | SEQ ID NO: 533 |
| 23 | | |
| PL5744, PL3651 | 19.177 | SEQ ID NO: 537 |
| 23 | | |
| PL5790, PL3651 | 19.269 | SEQ ID NO: 543 |
| 23 | | |
| PL5837 , PL3651 | 19.359 | SEQ ID NO: 531 |
| 23 | | |
| PL5738, PL3651 | 19.376 | SEQ ID NO: 542 |
| 23 | | |
| PL5738, PL3651 | 19.393 | SEQ ID NO: 542 |
| 23 | | |
| PL5737, PL3651 | 19.431 | SEQ ID NO: 180 |
| 23 | | |
| PL5789, PL3651 | 19.438 | SEQ ID NO: 540 |
| 23 | | |
| PL5841, PL3651 | 19.445 | SEQ ID NO: 534 |
| 23 | | |
| PL5845, PL3651 | 19.518 | SEQ ID NO: 539 |
| 23 | | |
| PL5742, PL3651 | 19.719 | SEQ ID NO: 538 |
| 23 | | |
| PL5841, PL3651 | 19.736 | SEQ ID NO: 534 |
| 23 | | |
| PL5833, PL3651 | 19.841 | SEQ ID NO: 544 |
| 23 | | |
| PL5790, PL3651 | 19.903 | SEQ ID NO: 543 |
| 23 | | |
| PL5747, PL3651 | 20.101 | SEQ ID NO: 545 |
| 23 | | |
| PL5747, PL3651 | 20.142 | SEQ ID NO: 545 |
| 23 | | |
| PL5849, PL3651 | 20.220 | SEQ ID NO: 546 |
| 23 | | |
| PL5742, PL3651 | 20.326 | SEQ ID NO: 538 |
| 23 | | |
| PL5790, PL3651 | 20.725 | SEQ ID NO: 543 |
| 23 | | |
| PL5789, PL3651 | 21.113 | SEQ ID NO: 540 |
| 23 | | |
| PL5833, PL3651 | 21.632 | SEQ ID NO: 544 |
| 23 | | |
| PL5748, PL3651 | 21.703 | SEQ ID NO: 532 |
| 23 | | |
| PL5833, PL3651 | 21.746 | SEQ ID NO: 544 |
| 23 | | |
| PL5786, PL3651 | 21.806 | SEQ ID NO: 547 |
| 23 | | |
| PL5849, PL3651 | 21.858 | SEQ ID NO: 546 |
| 23 | | |
| PL5747, PL3651 | 21.953 | SEQ ID NO: 545 |
| 23 | | |
| PL5849, PL3651 | 22.178 | SEQ ID NO: 546 |
| 23 | | |
| PL5786, PL3651 | 22.673 | SEQ ID NO: 547 |
| 23 | | |
| PL5786, PL3651 | 22.987 | SEQ ID NO: 547 |
| 23 | | |
| PL5741, PL3651 | 24.052 | SEQ ID NO: 548 |
| 23 | | |
| PL5741, PL3651 | 24.284 | SEQ ID NO: 548 |
| 23 | | |
| PL5741, PL3651 | 24.376 | SEQ ID NO: 548 |
| 23 | | |
| PL5853, PL3651 | 26.455 | SEQ ID NO: 549 |
| 23 | | |
| PL5853, PL3651 | 27.069 | SEQ ID NO: 549 |
| 23 | | |
| PL5853, PL3651 | 28.127 | SEQ ID NO: 549 |
| 23 | | |

### Example 11: D2S Enzyme Edit Genomic DNA in Mammalian Cells

[1089] D2S effectors were tested for their ability to produce indels in HEK293T cells. Briefly, 300 ng of plasmids expressing effector and transcribing targeting gRNA were delivered by lipofection to HEK293T cells in 96 well plates. TransIT-293 reagent was diluted with warmed up OPTIMEM and mixed with the plasmid DNA at the ratio of 2:1 lipid:DNA. Lipid:DNA mixture were incubated for 10 minutes at room temperature before adding 20 μL of the lipid:DNA optimem mixture to each well. Cells were incubated for 3 days before being lysed and subjected to PCR amplification. TABLE 19 shows the constructs (e.g., composition) test and their indel percent in HEK293T cells. Additionally, TABLE 19 also shows the effector protein Seq ID NO (under Enzyme Seq ID NO), and the crRNA or sgRNA sequence if applicable.

[1090] Indels were detected by next generation sequencing of PCR amplicons at the targeted loci and indel percentage was calculated as the fraction of sequencing reads containing insertions or deletions relative to an unedited reference sequence. Sequencing libraries with less than 20% of reads aligning to the reference sequence were excluded from the analysis for quality control purposes. “No plasmid” and SpyCas9 were included as negative and positive controls, respectively. TABLE 19 shows the results of this experiment. The results in TABLE 19 show the D2S enzymes had nuclease activity.

TABLE 19
Indels by D2S effectors

| Comp. | | | | |
|---|---|---|---|---|
| Enzyme SEQ | Indel | cr/sgRNA SEQ ID | | |
| ID NO: | percent | NO: | cr/sgRNA | tracrRNA if applicable |
| PL4891 | 0.498 | SEQ ID NO: 550 | crRNA in | CGAUUCCUCCCUACAGUAG |
| 211 | | | plasmid | UUAGGUAUAGCCGAAAGGU |
| PL4895 | 0.149 | SEQ ID NO: 551 | crRNA in | AGAGACUAAAUCUGUAGUU |
| 211 | | | plasmid | GGAGUGGGCCGCUUGCAUC |
| PL4904 | 1.028 | SEQ ID NO: 552 | crRNA in | GGCCUAAAGUUGAGAAGUG |
| 211 | | | plasmid | UCAGACUCUGAUAACCCUC |
| PL4907 | 0.500 | SEQ ID NO: 553 | crRNA in | AACGACGAUAUUCUUUAUU |
| 211 | | | plasmid | UCGGUUCAAAGUUCUGCAC |
| PL4908 | 0.198 | SEQ ID NO: 554 | crRNA in | AAAACAGGUGAGUCCUUAU |
| 211 | | | plasmid | AAACCGGUGUGCAGAACG |
| PL4909 | 0.965 | SEQ ID NO: 555 | crRNA in | (SEQ ID NO: 938) |
| 211 | | | plasmid | |
| PL4915 | 0.639 | SEQ ID NO: 550 | crRNA in | CGAUUCCUCCCUACAGUAG |
| 230 | | | plasmid | AGAGACUAAAUCUGUAGUU |
| PL4919 | 0.159 | SEQ ID NO: 551 | crRNA in | GGAGUGGGCCGCUUGCAUC |
| 230 | | | plasmid | UUAGGUAUAGCCGAAAGGU |
| PL4932 | 0.185 | SEQ ID NO: 554 | crRNA in | GGCCUAAAGUUGAGAAGUG |
| 230 | | | plasmid | UCAGACUCUGAUAACCCUC |
| | | | | AACGACGAUAUUCUUUAUU |
| | | | | UCGGUUCAAAGUUCUGCAC |
| | | | | AAAACAGGUGAGUCCUUAU |
| | | | | AAACCGGUGUGCAGAACG |
| | | | | (SEQ ID NO: 939) |
| PL4942 | 0.260 | SEQ ID NO: 556 | crRNA in | CGAUUCCUCCCUACAGUAG |
| 226 | | | plasmid | UUAGGUAUAGCCGAAAGGU |
| PL4952 | 0.167 | SEQ ID NO: 557 | crRNA in | AGAGACUAAAUCUGUAGUU |
| 226 | | | plasmid | GGAGUGGGCCGCUUGCAUC |
| | | | | GGCCUAAAGUUGAGAAGUG |
| | | | | UCAGACUCUGAUAACCCUC |
| | | | | AACGACGAUAUUCUUUAUU |
| | | | | UCGGUUCAAAGUUCUGCAC |
| | | | | AAAACAGGUGAGUCCUUAU |
| | | | | AAACCGGUGUGCAGAACG |
| | | | | (SEQ ID NO: 940) |
| PL4293 | 0.327 | SEQ ID NO: 558 | sgRNA in | N/A |
| 22 | | | plasmid | |
| PL4295 | 0.426 | SEQ ID NO: 559 | sgRNA in | N/A |
| 22 | | | plasmid | |
| PL4296 | 0.133 | SEQ ID NO: 181 | sgRNA in | N/A |
| 22 | | | plasmid | |
| PL4298 | 0.117 | SEQ ID NO: 182 | sgRNA in | N/A |
| 22 | | | plasmid | |
| PL4304 | 3.592 | SEQ ID NO: 184 | sgRNA in | N/A |
| 22 | | | plasmid | |
| PL4305 | 0.467 | SEQ ID NO: 560 | sgRNA in | N/A |
| 22 | | | plasmid | |
| PL4308 | 0.105 | SEQ ID NO: 561 | sgRNA in | N/A |
| 22 | | | plasmid | |
| PL4309 | 0.916 | SEQ ID NO: 185 | sgRNA in | N/A |
| 22 | | | plasmid | |
| PL4341 | 0.172 | SEQ ID NO: 562 | sgRNA in | N/A |
| 24 | | | plasmid | |
| PL4342 | 0.197 | SEQ ID NO: 563 | sgRNA in | N/A |
| 24 | | | plasmid | |
| PL4343 | 1.157 | SEQ ID NO: 564 | sgRNA in | N/A |
| 24 | | | plasmid | |
| PL4345 | 1.441 | SEQ ID NO: 565 | sgRNA in | N/A |
| 24 | | | plasmid | |
| PL4346 | 0.101 | SEQ ID NO: 566 | sgRNA in | N/A |
| 24 | | | plasmid | |
| PL4352 | 0.102 | SEQ ID NO: 567 | sgRNA in | N/A |
| 24 | | | plasmid | |
| PL4353 | 0.260 | SEQ ID NO: 568 | sgRNA in | N/A |
| 24 | | | plasmid | |
| PL4356 | 0.166 | SEQ ID NO: 569 | sgRNA in | N/A |
| 24 | | | plasmid | |
| PL4358 | 0.182 | SEQ ID NO: 570 | sgRNA in | N/A |
| 25 | | | plasmid | |
| PL4360 | 0.662 | SEQ ID NO: 481 | sgRNA in | N/A |
| 25 | | | plasmid | |
| PL4375 | 9.193 | SEQ ID NO: 571 | sgRNA in | N/A |
| 25 | | | plasmid | |
| PL4378 | 0.550 | SEQ ID NO: 572 | sgRNA in | N/A |
| 25 | | | plasmid | |
| PL4381 | 0.970 | SEQ ID NO: 573 | sgRNA in | N/A |
| 25 | | | plasmid | |
| PL4389 | 0.160 | SEQ ID NO: 558 | sgRNA in | N/A |
| 26 | | | plasmid | |
| PL4391 | 0.373 | SEQ ID NO: 559 | sgRNA in | N/A |
| 26 | | | plasmid | |
| PL4404 | 0.193 | SEQ ID NO: 561 | sgRNA in | N/A |
| 26 | | | plasmid | |
| PL4406 | 0.238 | SEQ ID NO: 574 | sgRNA in | N/A |
| 28 | | | plasmid | |
| PL4408 | 0.783 | SEQ ID NO: 575 | sgRNA in | N/A |
| 28 | | | plasmid | |
| PL4417 | 0.131 | SEQ ID NO: 576 | sgRNA in | N/A |
| 28 | | | plasmid | |
| PL4426 | 0.639 | SEQ ID NO: 577 | sgRNA in | N/A |
| 28 | | | plasmid | |
| PL4427 | 0.247 | SEQ ID NO: 578 | sgRNA in | N/A |
| 28 | | | plasmid | |
| PL4434 | 0.889 | SEQ ID NO: 579 | sgRNA in | N/A |
| 29 | | | plasmid | |
| PL4453 | 0.106 | SEQ ID NO: 580 | sgRNA in | N/A |
| 29 | | | plasmid | |
| PL4454 | 0.271 | SEQ ID NO: 570 | sgRNA in | N/A |
| 31 | | | plasmid | |
| PL4456 | 0.822 | SEQ ID NO: 481 | sgRNA in | N/A |
| 31 | | | plasmid | |
| PL4474 | 0.560 | SEQ ID NO: 572 | sgRNA in | N/A |
| 31 | | | plasmid | |
| PL4477 | 0.756 | SEQ ID NO: 573 | sgRNA in | N/A |
| 31 | | | plasmid | |
| PL4486 | 0.156 | SEQ ID NO: 581 | sgRNA in | N/A |
| 32 | | | plasmid | |
| PL4487 | 0.299 | SEQ ID NO: 582 | sgRNA in | N/A |
| 32 | | | plasmid | |
| PL4488 | 0.260 | SEQ ID NO: 583 | sgRNA in | N/A |
| 32 | | | plasmid | |
| PL4497 | 0.316 | SEQ ID NO: 584 | sgRNA in | N/A |
| 32 | | | plasmid | |
| PL4500 | 0.409 | SEQ ID NO: 585 | sgRNA in | N/A |
| 32 | | | plasmid | |
| PL4501 | 0.364 | SEQ ID NO: 586 | sgRNA in | N/A |
| 32 | | | plasmid | |
| PL4510 | 0.116 | SEQ ID NO: 581 | sgRNA in | N/A |
| 30 | | | plasmid | |
| PL4513 | 0.825 | SEQ ID NO: 587 | sgRNA in | N/A |
| 30 | | | plasmid | |
| PL4520 | 0.338 | SEQ ID NO: 588 | sgRNA in | N/A |
| 30 | | | plasmid | |
| PL4524 | 0.241 | SEQ ID NO: 585 | sgRNA in | N/A |
| 30 | | | plasmid | |
| PL4670 | 0.191 | SEQ ID NO: 574 | sgRNA in | N/A |
| 34 | | | plasmid | |
| PL4699 | 0.239 | SEQ ID NO: 589 | crRNA in | GAAGGCCGACCUGUACGGC |
| 15 | | | plasmid | CUUAAGGUUGAGAAGGCAC |
| PL4700 | 0.219 | SEQ ID NO: 590 | crRNA in | AUGUAAGUGGAAAAAUGCU |
| 15 | | | plasmid | CCAAGCACACACGUUUUUU |
| PL4701 | 0.230 | SEQ ID NO: 591 | crRNA in | UUCCCGUUGUGUUCGCUCA |
| 15 | | | plasmid | U (SEQ ID NO: 107) |
| PL4751 | 0.122 | SEQ ID NO: 592 | crRNA in | AUAUUAAGGGCGGCUCAGC |
| 44 | | | plasmid | GUCCUUAAGUCGAGAAAGU |
| | | | | AUACAUAAAUUUCUUAUAU |
| | | | | AGAAUAGUAGAUACUCUCG |
| | | | | GCAAGGUAUAAACCCUACA |
| | | | | AAUUUAAUCCUUGUAGGCA |
| | | | | ACUUAUAUUUGUAUUUAUU |
| | | | | U (SEQ ID NO: 145) |
| PL4771 | 0.623 | SEQ ID NO: 593 | crRNA in | AAACAAGGGCGGCUCAACG |
| 45 | | | plasmid | UCCUAGAAUCGAGAAAGUA |
| PL4788 | 0.217 | SEQ ID NO: 594 | crRNA in | UGCGUAAGACUUAUUUAUU |
| 45 | | | plasmid | GAGCGGUAGAUACUCUCGG |
| | | | | UAAGGUAUAAAUUC (SEQ |
| | | | | ID NO: 148) |
| PL4862 | 0.186 | SEQ ID NO: 595 | crRNA in | AUGAAUAGGAUUUAUCCUA |
| 34 | | | plasmid | UGGGGCAGUUGGUUGCCCU |
| PL4864 | 0.637 | SEQ ID NO: 596 | crRNA in | UAGCCUGAGGCAUUUAAUG |
| 34 | | | plasmid | CACUCGGGAAGUACCUUUU |
| PL4882 | 0.423 | SEQ ID NO: 597 | crRNA in | CUCA (SEQ ID NO: 121) |
| 34 | | | plasmid | |

### Example 12: PAM Screening for D2S Effector Proteins

[1091] D2S effector proteins and guide RNA combinations were screened by in vitro enrichment (IVE) for PAM recognition. Effector proteins and guide RNAs were expressed and purified from HEK293T cells. Briefly, effector proteins were complexed with corresponding guide RNAs for 15 minutes at 37° C. The complexes were added to an IVE reaction mix. PAM screening reactions used 10 μl of RNP in 100 μl reactions with 1,000 ng of a 5′ PAM library in 1× Cutsmart buffer and were carried out for 15 minutes at 25° C., 45 minutes at 37° C. and 15 minutes at 45° C. Reactions were terminated with 1 μl of proteinase K and 5 μl of 500 mM EDTA for 30 minutes at 37° C. Cis cleavage by each complex was confirmed by gel electrophoresis. Next generation sequencing was performed on cut sequences to confirm enriched PAMs. The PAM enrichment for the top 5% enrichment (PAM 5% in TABLE 20) generally had lower signal due to more noise than the 1% (PAM 1% in TABLE 20). In some cases, the 1% enrichment met the cutoff criteria, but the 5% enrichment did not. In such cases, a PAM is included for the 1% enrichment, but not the 5% enrichment. Complexes (e.g., the composition) and corresponding identified PAMs are provided in TABLE 20. Additionally, TABLE 20 also shows the effector protein Seq ID NO (under Enzyme Seq ID NO), and the cr/sgRNA designation number, tracr RNA designation number, and their corresponding sequences if applicable. FIGS. 7A-7E illustrate PAM preferences for the different D2S effector proteins used in this example. As shown in TABLE 20, examination the IVE assay revealed the presence of enriched 5′ PAM consensus sequences for the various D2S effector proteins.

TABLE 20
Compositions for D2S effector protein PAM screening

| | | | cr/sgRNA # | | tracrRNA # |
|---|---|---|---|---|---|
| Comp. | | | cr/sgRNA SEQ ID | cr/ | tracrRNA SEQ ID |
| Enzyme SEQ ID NO: | PAM 1% | PAM 5% | NO: | sgRNA | NO: |
| PL5632, R5724, R5780 | NNNNTYN (SEQ ID NO: | NNNNTYN (SEQ ID NO: | R5724 | crRNA | R5780 |
| 227 | 335) | 335) | (SEQ ID NO: 598) | | (SEQ ID NO: 599) |
| PL5636, R5693, R5827 | NNNNCCR (SEQ ID NO: | NNNNCCN (SEQ ID NO: | R5693 | crRNA | R5827 |
| 231 | 313) | 312) | (SEQ ID NO: 600) | | (SEQ ID NO: 601) |
| PL5637, R5865 | NNNNNCC (SEQ ID NO: | NNNNNCC (SEQ ID NO: | R5865 | sgRNA | |
| 239 | 315) | 315) | (SEQ ID NO: 602) | | |
| PL5637, R5866 | NNNNNCC (SEQ ID NO: | NNNNNCC (SEQ ID NO: | R5866 | sgRNA | |
| 239 | 315) | 315) | (SEQ ID NO: 603) | | |
| PL5638, R4876, R4942 | NNNNNCC (SEQ ID NO: | NNNNNCC (SEQ ID NO: | R4876 | crRNA | R4942 |
| 16 | 315) | 315) | (SEQ ID NO: 60) | | (SEQ ID NO: 107) |
| PL5638, R4849, R5952 | NNNNNCC (SEQ ID NO: | NNNNNCC (SEQ ID NO: | R4849 | crRNA | R5952 |
| 16 | 315) | 315) | (SEQ ID NO: 61) | | (SEQ ID NO: 604) |
| PL5638, R5917 | NNNNNCC (SEQ ID NO: | NNNNNCC (SEQ ID NO: | R5917 | sgRNA | |
| 16 | 315) | 315) | (SEQ ID NO: 605) | | |
| PL5638, R5919 | NNNNNCC (SEQ ID NO: | NNNNNCC (SEQ ID NO: | R5919 | sgRNA | |
| 16 | 315) | 315) | (SEQ ID NO: 606) | | |
| PL5642, R4852, R4908 | NNNNNCC (SEQ ID NO: | NNNNNCC (SEQ ID NO: | R4852 | crRNA | R4908 |
| 19 | 315) | 315) | (SEQ ID NO: 64) | | (SEQ ID NO: 607) |
| PL5642, R4852, R5955 | NNNNNCC (SEQ ID NO: | NNNNNCC (SEQ ID NO: | R4852 | crRNA | R5955 |
| 19 | 315) | 315) | (SEQ ID NO: 64) | | (SEQ ID NO: 608) |
| PL5642, R5917 | NNNNNCC (SEQ ID NO: | NNNNNCC (SEQ ID NO: | R5917 | sgRNA | |
| 19 | 315) | 315) | (SEQ ID NO: 605) | | |
| PL5643, R4853, R5956 | NNNNNCC (SEQ ID NO: | NNNNNCC (SEQ ID NO: | R4853 | crRNA | R5956 |
| 20 | 315) | 315) | (SEQ ID NO: 62) | | (SEQ ID NO: 609) |
| PL5649, R5853 | NNANRTT (SEQ ID NO: | NNNNRTT (SEQ ID NO: | R5853 | sgRNA | |
| 207 | 304) | 324) | (SEQ ID NO: 610) | | |
| PL5640, R5917 | NNNNNCC (SEQ ID NO: | NNNNNCC (SEQ ID NO: | R5917 | sgRNA | |
| 14 | 315) | 315) | (SEQ ID NO: 605) | | |
| PL5640, R5919 | NNNNNCC (SEQ ID NO: | NNNNNCC (SEQ ID NO: | R5919 | sgRNA | |
| 14 | 315) | 315) | (SEQ ID NO: 606) | | |
| PL5640, R4876, R4942 | NNNNNCC (SEQ ID NO: | NNNNNCC (SEQ ID NO: | R4876 | crRNA | R4942 |
| 14 | 315) | 315) | (SEQ ID NO: 60) | | (SEQ ID NO: 611) |

### Example 13: PAM Screening for D2S Effector Proteins

[1092] D2S effector proteins and guide RNA combinations were screened by in vitro enrichment (IVE) for PAM recognition. Effector proteins and guide RNAs were expressed and purified from E. coli. Briefly, effector proteins were complexed with corresponding guide RNAs for 15 minutes at 37° C. The complexes were added to an IVE reaction mix. PAM screening reactions used 10 μl of RNP in 100 μl reactions with 1,000 ng of a 5′ PAM library in 1× Cutsmart buffer and were carried out for 15 minutes at 25° C., 45 minutes at 37° C. and 15 minutes at 45° C. Reactions were terminated with 1 μl of proteinase K and 5 μl of 500 mM EDTA for 30 minutes at 37° C. Cis cleavage by each complex was confirmed by gel electrophoresis. Next generation sequencing was performed on cut sequences to confirm enriched PAMs. The PAM enrichment for the top 5% enrichment (PAM 5% in TABLE 21) generally had lower signal due to more noise than the 1% (PAM 1% in TABLE 21). In some cases, the 1% enrichment met the cutoff criteria, but the 5% enrichment did not. In such cases, a PAM is included for the 1% enrichment, but not the 5% enrichment. Complexes (e.g., the composition) and corresponding identified PAMs are provided in TABLE 21. Additionally, TABLE 21 also shows the effector protein Seq ID NO (under Enzyme Seq ID NO), the cr/sgRNA designation number, its corresponding sequence if applicable. FIGS. 7A-7E illustrate PAM preferences for the different D2S effector proteins used in this example. As shown in TABLE 21, examination the WE assay revealed the presence of enriched 5′ PAM consensus sequences for the various D2S effector proteins.

TABLE 21
Compositions for D2S effector protein PAM screening

| Comp. | | | cr/sgRNA # | |
|---|---|---|---|---|
| Enzyme SEQ | | | cr/sgRNA_SEQ | cr/ |
| ID NO: | PAM 1% | PAM 5% | ID NO: | sgRNA |
| PL4970, R7618 | NNTTTYN (SEQ | NNNNTYN (SEQ ID | R7618 | sgRNA |
| 232 | ID NO: 365) | NO: 335) | (SEQ ID NO: 612) | |
| PL4991, R7605 | NNNWNTG (SEQ | NNNNNTG (SEQ ID | R7605 | sgRNA |
| 233 | ID NO: 360) | NO: 318) | (SEQ ID NO: 613) | |
| PL4992, R7608 | NNNRTRG (SEQ | NNNNNNG (SEQ ID | R7608 | sgRNA |
| 240 | ID NO: 343) | NO: 301) | (SEQ ID NO: 614) | |
| PL5632, R7620 | NNNNTYN (SEQ | NNNNTYN (SEQ ID | R7620 | sgRNA |
| 227 | ID NO: 335) | NO: 335) | (SEQ ID NO: 615) | |

### Example 14: D2S Enzyme Edit Genomic DNA in Mammalian Cells

[1093] An enzyme was tested for its ability to produce indels in HEK293T cells. Briefly, a plasmid encoding the enzyme and guide RNA was delivered by lipofection to HEK293T cells. Cells were incubated for approximately 48 hours before being lysed. Indels were detected by next generation sequencing of PCR amplicons at the targeted loci and indel percentage was calculated as the fraction of sequencing reads containing insertions or deletions relative to an unedited reference sequence. Sequencing libraries with less than 20% of reads aligning to the reference sequence were excluded from the analysis for quality control purposes. “No plasmid” and SpyCas9 were included as negative and positive controls, respectively. TABLE 22 describes the sequence of the single guide RNA tested and percent of reads with indels. Additionally, TABLE 22 shows the composition tested, the PAM 1% enrichment sequence, the effector protein Seq ID NO (under Enzyme Seq ID NO), and the sgRNA sequence if applicable. The results in TABLE 22 show the D2S enzyme had nuclease activity.

TABLE 22
Indels by an D2S effector

| | | | Enzyme SEQ | |
|---|---|---|---|---|
| Comp. | PAM 1% | Indel percent | ID NO: | sgRNA SEQ ID NO: |
| PL6015 | TNTG (SEQ ID NO: 368) | 0.385 | 228 | SEQ ID NO: 616 |

### Example 15: PAM Screening for D2S Effector Proteins

[1094] D2S effector proteins and guide RNA combinations were screened by in vitro enrichment (IVE) for PAM recognition. Effector proteins and guide RNAs were expressed and purified from E. coli cells. Briefly, effector proteins were complexed with corresponding guide RNAs for 15 minutes at 37° C. The complexes were added to an IVE reaction mix. PAM screening reactions used 10 μl of RNP in 100 μl reactions with 1,000 ng of a 5′ PAM library in 1× Cutsmart buffer and were carried out for 15 minutes at 25° C., 45 minutes at 37° C. and 15 minutes at 45° C. Reactions were terminated with 1 μl of proteinase K and 5 μl of 500 mM EDTA for 30 minutes at 37° C. Cis cleavage by each complex was confirmed by gel electrophoresis. Next generation sequencing was performed on cut sequences to confirm enriched PAMs. The PAM enrichment for the top 5% enrichment (PAM 5% in TABLE 23) generally had lower signal due to more noise than the 1% (PAM 1% in TABLE 23). In some cases the 1% enrichment met the cutoff criteria, but the 5% enrichment did not. In such cases, a PAM is included for the 1% enrichment, but not the 5% enrichment. Complexes (e.g., the composition) and corresponding identified PAMs are provided in TABLE 23. Additionally, TABLE 23 also shows the effector protein Seq ID NO (under Enzyme Seq ID NO), and the cr/sgRNA designation number, tracr RNA designation number, and their corresponding sequences if applicable. FIGS. 7A-7E illustrate PAM preferences for the different D2S effector proteins used in this example. As shown in TABLE 23, examination the IVE assay revealed the presence of enriched 5′ PAM consensus sequences for the various D2S effector proteins.

TABLE 23
Compositions for D2S effector protein PAM screening

| | Enzyme | | | cr/sgRNA # | | tracrRNA # |
|---|---|---|---|---|---|---|
| | SEQ | | | cr/sgRNA SEQ ID | | tracrRNA SEQ ID |
| Comp. | ID NO: | PAM1% | PAM5% | NO: | cr/sgRNA | NO: |
| PL5370, R6401, | 215 | NNNRTRG (SEQ ID NO: | NNNRTRG | R6401 | crRNA | R6631 |
| R6631 | | 343) | (SEQ ID NO: 343) | (SEQ ID NO: 617) | | (SEQ ID NO: 618) |
| PL5370, R6401, | 215 | NNNRTRG (SEQ ID NO: | NNNRTRG (SEQ ID | R6401 | crRNA | R6630 |
| R6630 | | 343) | NO: 343) | (SEQ ID NO: 617) | | (SEQ ID NO: 619) |
| PL5370, R6708 | 215 | NNNRTRG (SEQ ID NO: | NNNRTRG (SEQ ID | R6708 | sgRNA | |
| | | 343) | NO: 343) | (SEQ ID NO: 620) | | |
| PL5370, R6707 | 215 | NNNRTRG (SEQ ID NO: | NNNRTRG (SEQ ID | R6707 | sgRNA | |
| | | 343) | NO: 343) | (SEQ ID NO: 621) | | |

### Example 16: PAM Screening for D2S Effector Proteins

[1095] D2S effector proteins and guide RNA combinations were screened by in vitro enrichment (IVE) for PAM recognition. Effector proteins and guide RNAs were expressed and purified from E. coli. Briefly, effector proteins were complexed with corresponding guide RNAs for 15 minutes at 37° C. The complexes were added to an IVE reaction mix. PAM screening reactions used 10 μl of RNP in 100 μl reactions with 1,000 ng of a 5′ PAM library in 1× Cutsmart buffer and were carried out for 15 minutes at 25° C., 45 minutes at 37° C. and 15 minutes at 45° C. Reactions were terminated with 1 μl of proteinase K and 5 μl of 500 mM EDTA for 30 minutes at 37° C. Cis cleavage by each complex was confirmed by gel electrophoresis. Next generation sequencing was performed on cut sequences to confirm enriched PAMs. The PAM enrichment for the top 5% enrichment (PAM 5% in TABLE 24) generally had lower signal due to more noise than the 1% (PAM 1% in TABLE 24). Complexes (e.g., the composition) and corresponding identified PAMs are provided in TABLE 24. Additionally, TABLE 24 also shows the effector protein Seq ID NO (under Enzyme Seq ID NO), and the cr/sgRNA designation number, tracr RNA designation number, and their corresponding sequences if applicable. As shown in TABLE 24, the IVE assay revealed the presence of enriched 5′ PAM consensus sequences for the effector protein SEQ ID NO: 23.

TABLE 24
Compositions for D2S effector protein PAM screening

| | | | cr/sgRNA # | | tracrRNA # |
|---|---|---|---|---|---|
| Comp. | | | cr/sgRNA | cr/ | tracrRNA |
| Enzyme Seq ID NO: | PAM 1% | PAM_5% | Seq ID NO: | sgRNA | Seq ID NO: |
| PL3296, R4856, R4893 | NNNNKCG (SEQ ID NO: | NNNNKYG (SEQ ID NO: | R4856 | crRNA | R4893 |
| 23 | 326) | 327) | (SEQ ID NO: 68) | | (SEQ ID NO: 120) |
| PL3296, R4856, R4893 | NNNNKCG (SEQ ID NO: | NNNNKYG (SEQ ID NO: | R4856 | crRNA | R4893 |
| 23 | 326) | 327) | (SEQ ID NO: 68) | | (SEQ ID NO: 120) |
| PL3296, R4856, R4893 | NNNNTCG (SEQ ID NO: | NNNNTYG (SEQ ID NO: | R4856 | crRNA | R4893 |
| 23 | 325) | 328) | (SEQ ID NO: 68) | | (SEQ ID NO: 120) |
| PL3296, R4886 | NNNNTYG (SEQ ID NO: | NNNNTYG (SEQ ID NO: | R4886 | sgRNA | |
| 23 | 328) | 328) | (SEQ ID NO: 149) | | |
| PL3296, 4886 | NNNNTCG (SEQ ID NO: | NNNNTYG (SEQ ID NO: | R4886 | sgRNA | |
| 23 | 325) | 328) | (SEQ ID NO: 149) | | |
| PL3296, R4886 | NNNNTYG (SEQ ID NO: | NNNNTYG (SEQ ID NO: | R4886 | sgRNA | |
| 23 | 328) | 328) | (SEQ ID NO: 149) | | |

### Example 17: Guide RNA Optimization of Repeat Sequences

[1096] Guide RNAs were optimized for specific repeat sequences and designed to increase indel frequency. Repeat sequences were mutated and/or truncated for optimization. Guides with the optimized repeat sequence were tested in the indel experiments described herein for their ability to produce indels. Table 25 shows the different parts of the optimized guide RNA sequences (i.e., the tracrRNA sequence, the linker sequence, the repeat sequence, the spacer sequence, and the full sgRNA sequence).

TABLE 25
Optimized Guide Sequences

| Enzyme | | | | | |
|---|---|---|---|---|---|
| Seq ID | | Linker | Repeat | Spacer | |
| NO: | TracrRNA Sequence | sequence | Sequence | sequence | Full sgRNA sequence |
| 23 | UGGGGCAGUUGGUUGCCCUU | GAAA | UGGUAUA | GUGCCUUA | UGGGGCAGUUGGUUGCCCUUAGCCUGAGGCAUUU |
| | AGCCUGAGGCAUUUAUUGCA | (SEQ ID | UCCAAC | GUUUCUUC | AUUGCACUCGGGAAGUACCAUUUCUCAGAAAUGG |
| | CUCGGGAAGUACCAUUUCUC | NO: 623) | (SEQ ID NO: | AUCU (SEQ | UAUAUCCAACGUGCCUUAGUUUCUUCAUCU(SEQ |
| | A (SEQ ID NO: 622) | | 624) | ID NO: 625) | ID NO: 626) |
| 23 | UGGGGCAGUUGGUUGCCCUU | | UACAUCC | UCUAGGCG | UGGGGCAGUUGGUUGCCCUUAGCCUGAGGCAUUU |
| | AGCCUGAGGCAUUUAUUGCA | | AAC (SEQ | CCCGCUAA | AUUGCACUCGGGAAGUACCAUUACAUCCAACUCU |
| | CUCGGGAAGUACCAU | | ID NO: 628) | GUUC (SEQ | AGGCGCCCGCUAAGUUC (SEQ ID NO: 517) |
| | (SEQ ID NO: 627) | | | ID NO: 629) | |
| 23 | UGGGGCAGUUGGUUGCCCUU | GAAA | UGGUACA | CGUGCUGU | UGGGGCAGUUGGUUGCCCUUAGCCUGAGGCAUUU |
| | AGCCUGAGGCAUUUAUUGCA | (SEQ ID | UCCAAC | UUCCUCCC | AUUGCACUCGGGAAGUACCAUUUCUCAGAAAUGG |
| | CUCGGGAAGUACCAUUUCUC | NO: 623) | (SEQ ID NO: | CACA (SEQ | UACAUCCAACCGUGCUGUUUCCUCCCCACA |
| | A (SEQ ID NO: 622) | | 630) | ID NO: 631) | (SEQ ID NO: 632) |
| 23 | AUGGGGCAGUUGGUUGCCCU | GAAA | AAC (SEQ | CGUGCUGU | AUGGGGCAGUUGGUUGCCCUUAGCCUGAGGCAUU |
| | UAGCCUGAGGCAUUUAAUGC | (SEQ ID | ID NO: 634) | UUCCUCCC | UAAUGCACUCGGGAGAAAAACCGUGCUGUUUCCU |
| | ACUCGGGA (SEQ ID | NO: 623) | | CACG (SEQ | CCCCACG (SEQ ID NO: 636) |
| | NO: 633) | | | ID NO: 635) | |
| 23 | AUGGGGCAGUUGGUUGCCCU | GAAA | AUCCAAC | CGUGCUGU | AUGGGGCAGUUGGUUGCCCUUAGCCUGAGGCAUU |
| | UAGCCUGAGGCAUUUAAUGC | (SEQ ID | (SEQ ID NO: | UUCCUCCC | UAAUGCACUCGGGAAGUACCGAAAAUCCAACCGU |
| | ACUCGGGAAGUACC (SEQ | NO: 623) | 638) | CACG (SEQ | GCUGUUUCCUCCCCACG (SEQ ID NO: 639) |
| | ID NO: 637) | | | ID NO: 635) | |
| 23 | AUGGGGCAGUUGGUUGCCCU | GAAA | AGGUACA | CGUGCUGU | AUGGGGCAGUUGGUUGCCCUUAGCCUGAGGCAUU |
| | UAGCCUGAGGCAUUUAAUGC | (SEQ ID | UCCAAC | UUCCUCCC | UAAUGCACUCGGGAAGUACCUUUUCUCAGAAAAG |
| | ACUCGGGAAGUACCUUUUCU | NO: 623) | (SEQ ID NO: | CACG (SEQ | GUACAUCCAACCGUGCUGUUUCCUCCCCACG |
| | CA (SEQ ID NO: 640) | | 641) | ID NO: 635) | (SEQ ID NO: 642) |
| 23 | AUGGGGCAGUUGGUUGCCCU | GAAA | CCAAC | UCUAGGCG | AUGGGGCAGUUGGUUGCCCUUAGCCUGAGGCAUU |
| | UAGCCUGAGGCAUUUAAUGC | (SEQ ID | (SEQ ID NO: | CCCGCUAA | UAAUGCACUCGGGAAGUACCUUUUCUCAGAAACC |
| | ACUCGGGAAGUACCUUUUCU | NO: 623) | 643) | GUUC (SEQ | AACUCUAGGCGCCCGCUAAGUUC (SEQ ID |
| | CA (SEQ ID NO: 640) | | | ID NO: 629) | NO: 644) |

### Example 18: Activation of Gene Expression with CasLambda Fusion (CRISPRa)

[1097] Multiple gene targets, including NEUROD1, HBG1, ASCL1, and LIN28A, were selected for testing the ability of VPR-CasM fusions to increase endogenous gene expression. A nucleic acid vector encoding VPR (SEQ ID NO: 300) was fused to catalytically inactive CasM proteins at their N′ terminus with an XTEN10 linker (GSPAGSPTST SEQ ID NO: 711) and at least one CasM gRNA targeting an endogenous gene were introduced to cells via lipofection. Relative amounts of RNA, indicative of relative gene expression, were quantified with RT-qPCR. An increase of gene expression was observed with individual different gRNAs. A scramble sequence spacer (nt), and a pooled sample were used as negative controls. A catalytically inactive “dead” Cas9 fusion, dCas9, was included as a positive control. The fusion proteins were tested for their ability to increase expression in NEUROD1, HBG1, ASCL1, and LIN28A by different VPR-CasM fusions. FIG. 8A shows the change in gene expression by CasM.286251 (D267A) (SEQ ID NO: 728) with an N terminal VPR fused by an XTEN10 linker, which demonstrated upregulation with guides 1-8 for ASCL1, HBG1 and LIN28A relative to the scrambled sequence control. FIG. 8B shows the change in gene expression by CasM.19952 (D267A) (SEQ ID NO: 729) with an N terminal VPR fused by an XTEN10 linker, which demonstrated upregulation with guides 1-8 for ASCL1 and HBG1 and guide 3 for NEUROD1 relative to the scrambled sequence control. FIG. 8C showed the change in gene expression by CasM.19952 (D267N) (SEQ ID NO: 730) with an N terminal VPR fused by an XTEN10 linker, which demonstrated upregulation with guides 1-8 for ASCL1 and guides 2-3 for NEUROD1 relative to the scrambled sequence control. FIG. 8D showed the change in gene expression by CasM.19952 (E363Q) (SEQ ID NO: 731) with an N terminal VPR fused by an XTEN10 linker, which demonstrated upregulation with guides 1-8 for ASCL1 and guides 2-3 for NEUROD1 relative to the scrambled sequence control. The PAM sequence for the CasM 19952 enzymes was NTCG (SEQ ID NO: 369) comprising the repeat sequence of: UGGGGCAGUUGGUUGCCCUUAGCCUGAGGCAUUUAUUGCACUCGGGAAGUACCAUUU CUCAGAAAUGGUACAUCCAAC (SEQ ID NO: 645). The PAM sequence for the CasM 286251 enzymes was RTTR (SEQ ID NO: 370) comprising the repeat sequence of: AUGGGGCAGUUGGUUGCCCUUAGCCUGAGGAAUUUAAUUCACUCGGGAAGUACCUUU CUCAUGAAAUGGUACAUCCAAC (SEQ ID NO: 646). Table 26 denotes the spacer sequence for the designated guide IDs in the FIGS. 8A-8D, the gene target, and the type of nucleases tested. The results show the catalytically inactive CasM proteins fused to VPR can increase the expression of genes.

TABLE 26
Guide sequences for Activation of Gene Expression

| ID in | | | |
|---|---|---|---|
| FIGs | | Gene | |
| 8A-8D | Spacer sequence | target | Nucleases |
| g1 | CCCCCCACUCCCCGCUGCUG (SEQ ID NO: 647) | ASCL1 | CasM.19952 |
| g2 | AAGUGGCAUCCUCUCUGAGC (SEQ ID NO: 648) | ASCL1 | CasM.19952 |
| g3 | CUUCCUCGUCUGCAGCCACA (SEQ ID NO: 649) | ASCL1 | CasM.19952 |
| g4 | ACUUUUCCUGUUUUCUCUCU (SEQ ID NO: 650) | ASCL1 | CasM.19952 |
| g5 | GGUUCCUCGGUGACCCUAGA (SEQ ID NO: 651) | ASCL1 | CasM.19952 |
| g6 | GUGACCCUAGAAAUUGGAGC (SEQ ID NO: 652) | ASCL1 | CasM.19952 |
| g7 | UCUGCAGCCACAGAAUAUGG (SEQ ID NO: 653) | ASCL1 | CasM.19952 |
| g8 | AGGAGCCACAGAGCAUUGAG (SEQ ID NO: 654) | ASCL1 | CasM.19952 |
| g1 | GAGGAGGGCGGGAGACGAGC (SEQ ID NO: 655) | NEUROD1 | CasM.19952 |
| g2 | UCUCCCGCCCUCCUCCGACA (SEQ ID NO: 656) | NEUROD1 | CasM.19952 |
| g3 | CCAGUUAGAGACUCCGCGGA (SEQ ID NO: 657) | NEUROD1 | CasM.19952 |
| g4 | CUCUGAUCUAGACCUAGUUA (SEQ ID NO: 658) | NEUROD1 | CasM.19952 |
| g5 | CGCCGGAAGUAGGACAGAGG (SEQ ID NO: 659) | NEUROD1 | CasM.19952 |
| g6 | AAAGGAGCGAGGACUCUUCA (SEQ ID NO: 660) | NEUROD1 | CasM.19952 |
| g7 | CUCCUUUCGAUUUCUUGUCC (SEQ ID NO: 661) | NEUROD1 | CasM.19952 |
| g8 | AUUUCUUGUCCUGACACUGG (SEQ ID NO: 662) | NEUROD1 | CasM.19952 |
| g1 | GAACAAGGCAAAGGCUAUAA (SEQ ID NO: 663) | HBG1 | CasM.19952 |
| g2 | AGUUAUAAUAGUGUGUGGAC (SEQ ID NO: 664) | HBG1 | CasM.19952 |
| g3 | AAUAUUAGUGUACUUUAGAC (SEQ ID NO: 665) | HBG1 | CasM.19952 |
| g4 | UUGAGCCCCUUCCUCGCUGC (SEQ ID NO: 666) | HBG1 | CasM.19952 |
| g5 | AAGGUACAUGUGCAGGAUGU (SEQ ID NO: 667) | HBG1 | CasM.19952 |
| g6 | GCAACCAGUAGCCCUUGCGU (SEQ ID NO: 668) | HBG1 | CasM.19952 |
| g7 | CACUUUCUUUCUUUGUCCUU (SEQ ID NO: 669) | HBG1 | CasM.19952 |
| g8 | GUGUUCAGUGGAUUAGAAAC (SEQ ID NO: 670) | HBG1 | CasM.19952 |
| g1 | GAGAAGAAGCUGCUACAUCU (SEQ ID NO: 671) | LIN28A | CasM.19952 |
| g2 | UUAACAAAUAUUAUUAGCAG (SEQ ID NO: 672) | LIN28A | CasM.19952 |
| g3 | UCCUACCCCCACCCCAUCCC (SEQ ID NO: 673) | LIN28A | CasM.19952 |
| g4 | GAGAUGGACAAUGGCCCGGG (SEQ ID NO: 674) | LIN28A | CasM.19952 |
| g5 | CUCCGUGUACCUCUGUUCCU (SEQ ID NO: 675) | LIN28A | CasM.19952 |
| g6 | GUGGAGAAGAUUGAAUUCAG (SEQ ID NO: 676) | LIN28A | CasM.19952 |
| g7 | UACGGGGUGCUCUCCAAGAA (SEQ ID NO: 677) | LIN28A | CasM.19952 |
| g8 | UGGGGUAAAAAGGACAAGAG (SEQ ID NO: 678) | LIN28A | CasM.19952 |
| g1 | AAAAGGCGGACGCACUCCGG (SEQ ID NO: 679) | ASCL1 | CasM.286251 |
| g2 | GGGGAGGGACUCCGUCCAGA (SEQ ID NO: 680) | ASCL1 | CasM.286251 |
| g3 | GAGACCAUAUUCUGUGGCUG (SEQ ID NO: 681) | ASCL1 | CasM.286251 |
| g4 | AGGUGUAUAGGUGGAAAGAC (SEQ ID NO: 682) | ASCL1 | CasM.286251 |
| g5 | UUCUCUUCGGGUUCCUCGGU (SEQ ID NO: 683) | ASCL1 | CasM.286251 |
| g6 | GAGCAAAUUACGAUUGAAGU (SEQ ID NO: 684) | ASCL1 | CasM.286251 |
| g7 | CGAUUGAAGUUUAGAAACAU (SEQ ID NO: 685) | ASCL1 | CasM.286251 |
| g8 | AAGUUUAGAAACAUGGUUGG (SEQ ID NO: 686) | ASCL1 | CasM.286251 |
| g1 | UCGGAGGAGGGCGGGAGACG (SEQ ID NO: 687) | NEUROD1 | CasM.286251 |
| g2 | AUCUCUCCUGCGGGUAAAAA (SEQ ID NO: 688) | NEUROD1 | CasM.286251 |
| g3 | GCUUUUCCCUUCCUUCCCUC (SEQ ID NO: 689) | NEUROD1 | CasM.286251 |
| g4 | ACAUUAGCUUUUCCCUUCCU (SEQ ID NO: 690) | NEUROD1 | CasM.286251 |
| g5 | ACUAGGUCUAGAUCAGAGCG (SEQ ID NO: 691) | NEUROD1 | CasM.286251 |
| g6 | GCGCCAAAGGAUGGCUUCUC (SEQ ID NO: 692) | NEUROD1 | CasM.286251 |
| g7 | GGAGAAGCCAUCCUUUGGCG (SEQ ID NO: 693) | NEUROD1 | CasM.286251 |
| g8 | GGGAACUAAUCUCAACGCUG (SEQ ID NO: 694) | NEUROD1 | CasM.286251 |
| g1 | GUCAAGUUUGCCUUGUCAAG (SEQ ID NO: 695) | HBG1 | CasM.286251 |
| g2 | GCCAGCCUUGCCUUGACCAA (SEQ ID NO: 696) | HBG1 | CasM.286251 |
| g3 | GUCAAGGCAAGGCUGGCCAA (SEQ ID NO: 697) | HBG1 | CasM.286251 |
| g4 | AGAUAGUGUGGGGAAGGGGC (SEQ ID NO: 698) | HBG1 | CasM.286251 |
| g5 | GCAGUGGUUUCUAAGGAAAA (SEQ ID NO: 699) | HBG1 | CasM.286251 |
| g6 | GAGAAAAACUGGAAUGACUG (SEQ ID NO: 700) | HBG1 | CasM.286251 |
| g7 | GUACAUGCUUUAGCUUUAAA (SEQ ID NO: 701) | HBG1 | CasM.286251 |
| g8 | AGAGAUAAUGGCAAAAGUCA (SEQ ID NO: 702) | HBG1 | CasM.286251 |
| g1 | GUUCGGAGAAGAAGCUGCUA (SEQ ID NO: 703) | LIN28A | CasM.286251 |
| g2 | UGCGGGGGAAGAUGUAGCAG (SEQ ID NO: 704) | LIN28A | CasM.286251 |
| g3 | UCUUUUAGAAUUUGGGAGCC (SEQ ID NO: 705) | LIN28A | CasM.286251 |
| g4 | GGUCAUUGUCUUUUAGAAUU (SEQ ID NO: 706) | LIN28A | CasM.286251 |
| g5 | UGGGGGAGGGCCGGAGCUGG (SEQ ID NO: 707) | LIN28A | CasM.286251 |
| g6 | UGCGUGUGGGGAGGGGGUGU (SEQ ID NO: 708) | LIN28A | CasM.286251 |
| g7 | GGGGAGGGAGGUGUGAGCCU (SEQ ID NO: 709) | LIN28A | CasM.286251 |
| g8 | GCCAGCGCCGCCAGGCUCAC (SEQ ID NO: 710) | LIN28A | CasM.286251 |

### Example 19: Base Editing with Dead CasM.19952 Variants—Deaminase Fusion Proteins

[1098] Multiple nucleic acid vectors encoding the catalytically inactive variant dCasM.19952 fusion protein (SEQ ID NO: 729 (dCasM.19952 (D267A)) were constructed as shown in FIG. 9 and assessed for base editing activity. These fusion proteins comprised a catalytically inactive variant dCasM.19952 (D267A) SEQ ID NO: 729, also referred to as “dead CasM” of the active CasM.19952 (SEQ ID NO: 23), and were fused to either ABE8e (SEQ ID NO: 713), ABE8.20m (SEQ ID NO: 714), APOBEC3, (SEQ ID NO: 732) or AncBE4Max (SEQ ID NO: 733), via an XTEN10 linker (GSPAGSPTST SEQ ID NO: 711), an XTEN40 (GSPAGSPTSTEEGTSESATPESGPGTSTEPSEGSAPGSPA SEQ ID NO: 734), or an XTEN80 linker (GSPAGSPTSTEEGTSESATPESGPGTSTEPSEGSAPGSPAGSPTSTEEGTSTEPSEGSAPGTSTEP SEGSAPGTSESATP SEQ ID NO: 735) The base editing effector sequences can be found in Table 27. These vectors also encoded an amino acid sequence containing a nuclear localization signal (PKKKRKV; SEQ ID NO: 712) fused to the dead CasM.19952. Guides with no effectors served as negative controls comprising no deaminase, or base editing function. Target sequences included sequences located in the genes for B2M, TRAC, CIITA, or NGCG_B2M. Guide RNA spacers sequences and their respective targets are provided in Table 28. Cells were transfected with the nucleic acid vectors and guide RNAs. After sufficient incubation, DNA was extracted from the transfected cells. Target sequences were PCR amplified and sequenced by NGS and MiSeq. The presence of base modifications was analyzed from sequencing data after subtraction of background editing (using the no deaminase control). FIG. 9 shows the indel percentage of (catalytically active) CasM.19952 and gRNAs at respective target sites.

[1099] Designs with observed based editing is shown in Table 29. Editing was observed in the CIITA_26, CIITA_1, and TRAC_5 targets. Little to no editing was observed in the B2M_5, CIITA_12, CIITA_19, CIITA_6, TRAC_1, TRAC_3, CIITA_15, NGCG_B2M_3, CIITA_9, and CIITA 20 targets. The rows in Table 29 show distinct fusion protein designs (for example, APOBEC3 (base editor) fused via a C-XTEN80 linker to dCasM.19952). The columns represent distinct guide RNA spacer sequences from Table 28. The bases where editing was observed are represented as the position within the spacer and shown under the guide RNAs. The bases in parentheses indicate bases where editing was not observed. These bases are either the next closest base to the observed edited bases or any bases near the putative editing window. The prefix + indicates number of positions after the spacer sequence. FIG. 10A and FIG. 10B shows the change in base call percentage along the spacer sequence for the CIITA t26 target. The spacer sequence is shown on the upper X-axis and the change in base call is shown in the Y-axis. FIG. 10A shows an about 1% base change in position A9 to a G base with the construct ABE8e-XTEN10-dCasM.19952(D267A). FIG. 10B shows an about 0.70%-0.75% base change in position C6 and C8 to a T base with the construct AncBE4Max-XTEN10-dCasM.19952(D267A). The results show dCasM.19952 can be fused with a base editing enzyme to generate base edits in a sequence.

TABLE 27
Fusion effector sequences

| | SEQ ID | |
|---|---|---|
| Name | NO: | Sequence |
| ABE8e | 713 | SEVEFSHEYWMRHALTLAKRARDEREVPVGAVLVLNNRVIGE |
| (base editor) | | GWNRAIGLHDPTAHAEIMALRQGGLVMQNYRLIDATLYVTFE |
| | | PCVMCAGAMIHSRIGRVVFGVRNSKRGAAGSLMNVLNYPGM |
| | | NHRVEITEGILADECAALLCDFYRMPRQVFNAQKKAQSSIN |
| ABE8.20m | 714 | SEVEFSHEYWMRHALTLAKRARDEREVPVGAVLVLNNRVIGE |
| (base editor) | | GWNRAIGLHDPTAHAEIMALRQGGLVMQNYRLYDATLYSTFE |
| | | PCVMCAGAMIHSRIGRVVFGVRNAKTGAAGSLMDVLHHPGM |
| | | NHRVEITEGILADECAALLCRFFRMPRRVFNAQKKAQSSTD |
| APOBEC3 | 732 | EASPASGPRHLMDPHIFTSNFNNGIGRHKTYLCYEVERLDNGTS |
| (base editor) | | VKMDQHRGFLHNQAKNLLCGFYGRHAELRFLDLVPSLQLDPA |
| | | QIYRVTWFISWSPCFSWGCAGEVRAFLQENTHVRLRIFAARIYD |
| | | YDPLYKEALQMLRDAGAQVSIMTYDEFKHCWDTFVDHQGCP |
| | | FQPWDGLDEHSQALSGRLRAILQNQGN |
| AncBE4Max | 733 | SSETGPVAVDPTLRRRIEPHEFEVFFDPRELRKETCLLYEIKWGT |
| (base editor) | | SHKIWRHSSKNTTKHVEVNFIEKFTSERHFCPSTSCSITWFLSWS |
| | | PCGECSKAITEFLSQHPNVTLVIYVARLYHHMDQQNRQGLRDL |
| | | VNSGVTIQIMTAPEYDYCWRNFVNYPPGKEAHWPRYPPLWMK |
| | | LYALELHAGILGLPPCLNILRRKQPQLTFFTIALQSCHYQRLPPH |
| | | ILWATGLK |

TABLE 28
Guide Spacer Sequences for Base Editing

| Target | Spacer |
|---|---|
| B2M_5 | CUCCGUGGCCUUAGCUGUGC (SEQ ID NO: 715) |
| CIITA_1 | GUGAGGAAGCACCUGAGCCC (SEQ ID NO: 716) |
| CIITA_12 | CUGCAUCCCUGCUCAGGCUA (SEQ ID NO: 717) |
| CIITA_19 | UCCUGGAGAGAACAGGCAAU (SEQ ID NO: 718) |
| CIITA_26 | CAGCUCUCAGCCACCUUCCC (SEQ ID NO: 719) |
| CIITA_6 | GGACCUAAAGAAACUGGAGU (SEQ ID NO: 720) |
| TRAC_1 | ACCAGCUUGACAUCACAGGA (SEQ ID NO: 721) |
| TRAC_3 | GAACCCAAUCACUGACAGGU (SEQ ID NO: 722) |
| TRAC_5 | GUGAAUAGGCAGACAGACUU (SEQ ID NO: 723) |
| CIITA_15 | CAGAUGCAGUUAUUGUACAA (SEQ ID NO: 724) |
| NGCG_B2M_3 | CGAGCACAGCUAAGGCCACG (SEQ ID NO: 725) |
| CIITA_9 | CUCCAUCAGCCACUGACCUG (SEQ ID NO: 726) |
| CIITA_20 | GGGACGAGGGUGUCUCGCAG (SEQ ID NO: 727) |

TABLE 29
Constructs with observed based editing in target sequences

| Construct | CIITA_26 | CIITA_1 | TRAC_5 |
|---|---|---|---|
| APOBEC3 C-XTEN80 | C6 (C4, C8) | | |
| BE4Max N-XTEN10 | C6, C8 (C4, C11) | | |
| ABE8e N-XTEN10 | A9 (A2, A13) | A8 (A7, A11) | A7 (A5, A11) |
| BE4Max N-XTEN40 | C6 (C4, C8) | | |
| ABE8e N-XTEN40 | A9 (A2, A13) | | |
| APOBEC3 N-XTEN80 | C6 (C4, C8) | | |
| ABE8e N-XTEN80 | A9, A13 (A2, A + 3) | | |

### Example 20: CasM.19952 Sequence Homology

[1100] It is well known that sequence diversity is a characteristic of CRISPR/Cas systems and that effector proteins can exhibit low levels of sequence identity yet belong to the same class, type or subtype of CRISPR effector protein. To assess sequence diversity between the D2S effector proteins, the sequences of the effector proteins were aligned using pairwise MUSCLE alignment. Each aligned sequence was compared to the CasM.19952 (SEQ ID NO: 23) aligned sequence. As shown in Table 30, 19 of the D2S effector proteins are at least 75% identical to CasM.19952.

TABLE 30
Sequence alignment of D2S effector proteins

| SEQ ID | Effector protein | Identity to |
|---|---|---|
| NO | name | CasM.19952 |
| 23 | CasM.19952 | 100.00 |
| 26 | CasM.288480 | 96.15 |
| 24 | CasM.274559 | 94.66 |
| 208 | CasM.272451 | 92.31 |
| 222 | CasM.289248 | 84.19 |
| 28 | CasM.289206 | 84.19 |
| 29 | CasM.290598 | 83.97 |
| 217 | CasM.287826 | 83.76 |
| 229 | CasM.294406 | 82.09 |
| 25 | CasM.286251 | 81.88 |
| 30 | CasM.290816 | 81.74 |
| 219 | CasM.287936 | 81.66 |
| 207 | CasM.270012 | 81.41 |
| 32 | CasM.295231 | 81.10 |
| 202 | CasM.19498 | 79.96 |
| 220 | CasM.288450 | 79.32 |
| 205 | CasM.19948 | 78.63 |
| 34 | CasM.279423 | 78.42 |
| 31 | CasM.295071 | 78.21 |
| 27 | CasM.288668 | 75.43 |
| 213 | CasM.285333 | 61.65 |
| 225 | CasM.290380 | 60.91 |
| 216 | CasM.287128 | 60.63 |
| 215 | CasM.286678 | 59.47 |
| 22 | CasM.19924 | 53.73 |

### Example 21: D2S Effector Protein Motif Analysis

[1101] The MEME algorithm (Multiple EM for Motif Elicitation, Bailey & Elkan, 1994) was used to identify sequence motifs that are shared by D2S effector proteins (SEQ ID Nos 1-45 and 202-240). The analysis was performed using the default parameters. This analysis identified the seven highly conserved motifs that are shown in FIG. 11A. The number of analyzed sequences that include the motifs is provided in Table 31 along with the length of each motif

TABLE 31
D2S motif analysis

| | Number of sequences that | |
|---|---|---|
| Motif ID | include the motif (out of 84) | Motif length |
| MEME_1 | 79 | 50 |
| MEME_2 | 81 | 29 |
| MEME_3 | 80 | 21 |
| MEME_4 | 30 | 41 |
| MEME_5 | 77 | 21 |
| MEME_6 | 76 | 15 |
| MEME_7 | 82 | 23 |

[1102] The weblogos in FIG. 11A provide multilevel consensus sequences. Weblogos corresponding to MEMS_1, MEME_2, MEME_3, MEMS 4, MEME_5, MEME_6 and MEME_7 are shown in FIG. 11A. This multilevel sequence analysis of the weblogos in FIG. 11A was used to generate the PROSITE motifs shown in Table 32. In Table 32, the brackets indicate amino acids in the alternative, for example [KG] means K or G. In another example [VFL] means V, F, or L. PROSITE motifs are routinely used in the art to conveniently illustrate consensus motifs.

TABLE 32
D2S PROSITE motifs

| Motif ID | PROSITE motif | SEQ ID NO |
|---|---|---|
| MEME_1 | [KG][ET]F[VFL][LG][RK]NW[SRT]Y[YF][EDQ]LQ[NT][MK] | 793 |
| | I[EK]YKA[KA]E[YA]GIKV[VE][KY][IV][NR]P[AK]YTS[QRK] | |
| | [RT]CS[WK]CG[YQH]I[GD][KF][RD][NF] | |
| MEME_2 | T[QL]NH[LRQ][YF]SR[EA][VL][IV][DEN][FY]AVK[NH]GA | 794 |
| | [GA]TI[QH]ME[DN]LSG | |
| MEME_3 | L[ND][KP][NKE][IK][VI][VL]GVDLG[IV][NS][VY]P[LA]Y | 795 |
| | [AV][AS][TV] | |
| MEME_4 | QW[GN]LLYHINDNLY[KR]AANNISSKLYLD[DE]HVSSMV | 796 |
| | R[LM]KH[AD]EYL | |
| MEME_5 | V[LK]RG[EK]R[SA][IL][PR][NTS][YF][KR][KS][GDN][MQ]P | 797 |
| | [IL]P[FI][HP][WC] | |
| MEME_6 | [NH]ADYNA[AS][RQ]N[IL][AS][IN][SK][KD][ID] | 798 |
| MEME_7 | [RY][LC][GK][GT][TG]R[GI]G[HK]GRK[KR][KR]LEP[LI] | 799 |
| | [EY][RK]L[RE][DG] | |

[1103] The location of the detected motifs in the effector proteins is illustrated in FIG. 11B. All motifs illustrated in FIG. 11B shared at least 36.5% identity to the PROSITE sequences shown in Table 32. In general, MEME_4 and MEME_5 are located in the N terminal half of the effector protein. In general, MEME_1, MEME_2, MEME_6, and MEME_7 are located in the C terminal half of the effector protein. In general, the order of MEMEs from N terminus to C terminus is: MEME_4, MEME_5, MEME_3, MEME_7, MEME_2, MEME_1, MEME_6.

[1104] In general, the motifs demonstrate a similar distribution in all D2S effector domains shown in FIG. 11B, namely MEME_4, MEME_5, MEME_3, MEME_7, MEME_2, MEME_1 and MEME_6 (from N- to C-terminus). All seven motifs were identified in a lot of the effector proteins shown in FIG. 11B. However, all seven motifs are not always identified in the effector proteins. For example, in some instances, MEME_4 was not identified, but the effector protein includes MEME_5, MEME_3, MEME_7, MEME_2, MEME_1 and MEME_6 (from N- to C-terminus) e.g. for CasM.298706.

[1105] The degree of identity of PROSITE motifs MEME_1 to MEME_7 in the D2S effector proteins that share greater than 75% identity with CasM.19952 was calculated. In calculating these degrees of identity, each alternative in a prosite motif was given an equal weight. For example, both NAD or HAD share 100% identity with the prosite motif [NH]AD. The output from this identity analysis is shown in Table 33.

TABLE 33
conservation of the D2S motifs

| Effector | | | | | | | |
|---|---|---|---|---|---|---|---|
| Protein | MEME_1 | MEME_2 | MEME_3 | MEME_4 | MEME_5 | MEME_6 | MEME_7 |
| CasM.19498 | 90 | 82.75862069 | 100 | 100 | 95.23809524 | 100 | 91.30434783 |
| CasM.19948 | 92 | 86.20689655 | 95.23809524 | 92.68292683 | 100 | 100 | 86.95652174 |
| CasM.19952 | 92 | 93.10344828 | 95.23809524 | 100 | 95.23809524 | 100 | 82.60869565 |
| CasM.270012 | 88 | 82.75862069 | 95.23809524 | 100 | 100 | 100 | 86.95652174 |
| CasM.272451 | 88 | 93.10344828 | 95.23809524 | 100 | 100 | 93.33333333 | 86.95652174 |
| CasM.274559 | 94 | 93.10344828 | 90.47619048 | 100 | 95.23809524 | 93.33333333 | 86.95652174 |
| CasM.279423 | 88 | 82.75862069 | 100 | 95.12195122 | 100 | 93.33333333 | 82.60869565 |
| CasM.286251 | 94 | 93.10344828 | 95.23809524 | 97.56097561 | 100 | 93.33333333 | 82.60869565 |
| CasM.287826 | 90 | 89.65517241 | 100 | 97.56097561 | 95.23809524 | 100 | 86.95652174 |
| CasM.287936 | 94 | 93.10344828 | 95.23809524 | 97.56097561 | 100 | 93.33333333 | 78.26086957 |
| CasM.288450 | 92 | 72.4137931 | 95.23809524 | 90.24390244 | 95.23809524 | 86.66666667 | 91.30434783 |
| CasM.288480 | 92 | 93.10344828 | 100 | 97.56097561 | 95.23809524 | 100 | 86.95652174 |
| CasM.288668 | 94 | 86.20689655 | 95.23809524 | 97.56097561 | 100 | 93.33333333 | 69.56521739 |
| CasM.289206 | 88 | 89.65517241 | 100 | 100 | 100 | 93.33333333 | 91.30434783 |
| CasM.289248 | 88 | 86.20689655 | 100 | 100 | 100 | 93.33333333 | 91.30434783 |
| CasM.290598 | 90 | 89.65517241 | 95.23809524 | 95.12195122 | 100 | 100 | 82.60869565 |
| CasM.290816 | 94 | 79.31034483 | 95.23809524 | 92.68292683 | 95.23809524 | 100 | 82.60869565 |
| CasM.294406 | 92 | 93.10344828 | 95.23809524 | 97.56097561 | 95.23809524 | 86.66666667 | 82.60869565 |
| CasM.295071 | 94 | 93.10344828 | 95.23809524 | 97.56097561 | 100 | 93.33333333 | 82.60869565 |
| CasM.295231 | 92 | 79.31034483 | 95.23809524 | 92.68292683 | 95.23809524 | 100 | 86.95652174 |

[1106] Table 33 shows that motifs MEME_1 to MEME_7 are highly conserved between D2S effector proteins that are at least 75% identical to CasM.19952. In particular, all effector proteins described in Table 33 comprise an amino acid sequence that is at least 69.5% or more identical to each of MEME_1 to MEME_7. All effector proteins described in Table 33 comprise an amino acid sequence that is at least 72% identical to each of MEME_1 to MEME_6. All effector proteins described in Table 33 comprise an amino acid sequence that is at least 90% identical to each of MEME_1, and MEME_3 to MEME_6.

[1107] MEME_4 was found to be a particularly useful motif for identifying the group of D2S effector proteins and distinguishing these D2S effector proteins from previously known effector proteins. All effector proteins described in Table 33 comprise an amino acid sequence that is at least 90% identical to MEME_4. In some cases, the D2S effector proteins include an amino acid sequence that is at least 37% identical to MEME4.

### Example 22: D2S Enzyme Edit Genomic DNA in Mammalian Cells

[1108] D2S effectors were tested for their ability to produce indels in HEK293T cells. Briefly, 300 ng of plasmids expressing effector and gRNA were delivered by lipofection to HEK293T cells in 96 well plates using TransIT-293 reagent at the ratio of 2:1 lipid:DNA. Cells were incubated for 3 days before being lysed and subjected to PCR amplification. Indels were detected by next generation sequencing of PCR amplicons at the targeted loci and indel percentage was calculated as the fraction of sequencing reads containing insertions or deletions relative to an unedited reference sequence. Sequencing libraries with less than 20% of reads aligning to the reference sequence were excluded from the analysis for quality control purposes. “No plasmid” and CasM.19952 (SEQ ID NO: 23) were included as negative and positive controls, respectively. TABLE 34 shows the results of this experiment. TABLE 34 describes the sgRNA sequences with and without spacer tested and percent of reads with indels. Additionally, TABLE 34 shows the composition tested, and the effector protein Seq ID NO (under Enzyme Seq ID NO). The results in TABLE 34 show these D2S enzymes are capable of modifying a genome in mammalian cells. Collectively, these guides targeted PAM sequences as described in TABLE 35.

TABLE 34
Results of Indel experiment with D2S effectors

| | Enzyme | | | |
|---|---|---|---|---|
| | SEQ | Indel | | |
| Comp. | ID NO | Percent | sgRNA sequence with spacer | sgRNA sequence without spacer |
| PL8080 | 220 | 1.506 | AAUAGGAUUUAUCCUAUGGGGCAGUUGGUUGC | AAUAGGAUUUAUCCUAUGGGGCAGUUGGUUGCC |
| | | | CCUUAGCCUGAGGCAUUUAUUGCACUCGGGAA | CUUAGCCUGAGGCAUUUAUUGCACUCGGGAAGU |
| | | | GUACCUUAUUUCAUUGAGCAACAGAAAGGGUA | ACCUUAUUUCAUUGAGCAACAGAAAGGGUACAU |
| | | | CAUCCAACUCUAGGCGCCCGCUAAGUUC (SEQ | CCAAC (SEQ ID NO: 737) |
| | | | ID NO: 736) | |
| PL8082 | 220 | 1.273 | AAUAGGAUUUAUCCUAUGGGGCAGUUGGUUGC | AAUAGGAUUUAUCCUAUGGGGCAGUUGGUUGCC |
| | | | CCUUAGCCUGAGGCAUUUAUUGCACUCGGGAA | CUUAGCCUGAGGCAUUUAUUGCACUCGGGAAGU |
| | | | GUACCUUAUUUCAUUGAGCAACAGAAAGGGUA | ACCUUAUUUCAUUGAGCAACAGAAAGGGUACAU |
| | | | CAUCCAACGGACAAAGUUUAGGGCGUCG (SEQ | CCAAC (SEQ ID NO: 737) |
| | | | ID NO 738) | |
| PL8083 | 220 | 1.287 | AAUAGGAUUUAUCCUAUGGGGCAGUUGGUUGC | AAUAGGAUUUAUCCUAUGGGGCAGUUGGUUGCC |
| | | | CCUUAGCCUGAGGCAUUUAUUGCACUCGGGAA | CUUAGCCUGAGGCAUUUAUUGCACUCGGGAAGU |
| | | | GUACCUUAUUUCAUUGAGCAACAGAAAGGGUA | ACCUUAUUUCAUUGAGCAACAGAAAGGGUACAU |
| | | | CAUCCAACAUAAGCGUCAGAGCGCCGAG (SEQ | CCAAC (SEQ ID NO: 737) |
| | | | ID NO 739) | |
| PL8086 | 220 | 0.861 | AAUAGGAUUUAUCCUAUGGGGCAGUUGGUUGC | AAUAGGAUUUAUCCUAUGGGGCAGUUGGUUGCC |
| | | | CCUUAGCCUGAGGCAUUUAUUGCACUCGGGAA | CUUAGCCUGAGGCAUUUAUUGCACUCGGGAAGU |
| | | | GUACCUUAUUUCAUUGAGCAACAGAAAGGGUA | ACCUUAUUUCAUUGAGCAACAGAAAGGGUACAU |
| | | | CAUCCAACCUCCGUGGCCUUAGCUGUGC (SEQ | CCAAC (SEQ ID NO: 737) |
| | | | ID NO 740) | |
| PL8087 | 220 | 9.254 | AAUAGGAUUUAUCCUAUGGGGCAGUUGGUUGC | AAUAGGAUUUAUCCUAUGGGGCAGUUGGUUGCC |
| | | | CCUUAGCCUGAGGCAUUUAUUGCACUCGGGAA | CUUAGCCUGAGGCAUUUAUUGCACUCGGGAAGU |
| | | | GUACCUUAUUUCAUUGAGCAACAGAAAGGGUA | ACCUUAUUUCAUUGAGCAACAGAAAGGGUACAU |
| | | | CAUCCAACGAUGGAUGAAACCCAGACAC (SEQ | CCAAC (SEQ ID NO: 737) |
| | | | ID NO 741) | |
| PL8090 | 220 | 3.132 | AAUAGGAUUUAUCCUAUGGGGCAGUUGGUUGC | AAUAGGAUUUAUCCUAUGGGGCAGUUGGUUGCC |
| | | | CCUUAGCCUGAGGCAUUUAUUGCACUCGGGAA | CUUAGCCUGAGGCAUUUAUUGCACUCGGGAAGU |
| | | | GUACCUUAUUUCAUUGAGCAACAGAAAGGGUA | |
| | | | CAUCCAACUGAUGAUUCUGCCCUCCUCC (SEQ | ACCUUAUUUCAUUGAGCAACAGAAAGGGUACAU |
| | | | ID NO 742) | CCAAC (SEQ ID NO: 737) |
| PL8091 | 220 | 9.643 | AAUAGGAUUUAUCCUAUGGGGCAGUUGGUUGC | AAUAGGAUUUAUCCUAUGGGGCAGUUGGUUGCC |
| | | | CCUUAGCCUGAGGCAUUUAUUGCACUCGGGAA | CUUAGCCUGAGGCAUUUAUUGCACUCGGGAAGU |
| | | | GUACCUUAUUUCAUUGAGCAACAGAAAGGGUA | ACCUUAUUUCAUUGAGCAACAGAAAGGGUACAU |
| | | | CAUCCAACAGUACAUCUUCAAGCCAUCC (SEQ | CCAAC (SEQ ID NO: 737) |
| | | | ID NO 743) | |
| PL8097 | 220 | 0.679 | AAUAGGAUUUAUCCUAUGGGGCAGUUGGUUGC | AAUAGGAUUUAUCCUAUGGGGCAGUUGGUUGCC |
| | | | CCUUAGCCUGAGGCAUUUAUUGCACUCGGGAA | CUUAGCCUGAGGCAUUUAUUGCACUCGGGAAGU |
| | | | GUACCUUAUUUCAUUGAGCAACAGAAAGGGUA | ACCUUAUUUCAUUGAGCAACAGAAAGGGUACAU |
| | | | CAUCCAACGACCUAAGGGAGAGCCAGGA (SEQ | CCAAC (SEQ ID NO: 737) |
| | | | ID NO 744) | |
| PL8100 | 220 | 1.225 | AAUAGGAUUUAUCCUAUGGGGCAGUUGGUUGC | |
| | | | CCUUAGCCUGAGGCAUUUAUUGCACUCGGGAA | |
| | | | GUACCUUAUUUCAUUGAGCAACAGAAAGGGUA | |
| | | | CAUCCAACGGAAGAUUCUGAUGUGGAAA(SEQ | |
| | | | ID NO 745) | |
| PL8133 | 233 | 0.531 | GGGGCAGUUGGAUGCCCUUAUGCUGAGGGAUU | GGGGCAGUUGGAUGCCCUUAUGCUGAGGGAUUA |
| | | | AUUCCACUCGGCAAGUACCAAUAAUAAUGGAU | UUCCACUCGGCAAGUACCAAUAAUAAUGGAUGU |
| | | | GUGAAAAGGUACAUCCAACUGAGUGGGGCAGU | GAAAAGGUACAUCCAAC (SEQ ID NO 747) |
| | | | GGGGGCG (SEQ ID NO 746) | |
| PL8150 | 233 | 11.948 | GGGGCAGUUGGAUGCCCUUAUGCUGAGGGAUU | GGGGCAGUUGGAUGCCCUUAUGCUGAGGGAUUA |
| | | | AUUCCACUCGGCAAGUACCAAUAAUAAUGGAU | UUCCACUCGGCAAGUACCAAUAAUAAUGGAUGU |
| | | | GUGAAAAGGUACAUCCAACUCGGGGGGCGGGG | GAAAAGGUACAUCCAAC (SEQ ID NO 747) |
| | | | GGGAGAA (SEQ ID NO 748) | |
| PL8178 | 240 | 0.553 | CGGGUGGUUGCACAUCCGAAGGGUGAGGAUUU | CGGGUGGUUGCACAUCCGAAGGGUGAGGAUUUA |
| | | | AUUCACUCACUAAUACUACAAAUGGAAAAAUU | UUCACUCACUAAUACUACAAAUGGAAAAAUUUA |
| | | | UAAAGGAAAAUGUAAAUGCAACCUCACGUCAU | AAGGAAAAUGUAAAUGCAAC (SEQ ID NO: 750) |
| | | | CCAGCAGAGA (SEQ ID NO: 749) | |
| PL8180 | 240 | 4.621 | CGGGUGGUUGCACAUCCGAAGGGUGAGGAUUU | CGGGUGGUUGCACAUCCGAAGGGUGAGGAUUUA |
| | | | AUUCACUCACUAAUACUACAAAUGGAAAAAUU | UUCACUCACUAAUACUACAAAUGGAAAAAUUUA |
| | | | UAAAGGAAAAUGUAAAUGCAACUUGUGCUGUA | AAGGAAAAUGUAAAUGCAAC (SEQ ID NO: 750) |
| | | | GGAAGCUCAU (SEQ ID NO: 751) | |
| PL8185 | 240 | 3.863 | CGGGUGGUUGCACAUCCGAAGGGUGAGGAUUU | CGGGUGGUUGCACAUCCGAAGGGUGAGGAUUUA |
| | | | AUUCACUCACUAAUACUACAAAUGGAAAAAUU | UUCACUCACUAAUACUACAAAUGGAAAAAUUUA |
| | | | UAAAGGAAAAUGUAAAUGCAACAUGAGAGCAA | AAGGAAAAUGUAAAUGCAAC (SEQ ID NO: 750) |
| | | | GUGGGCUGAU (SEQ ID NO: 752) | |
| PL8186 | 240 | 2.340 | CGGGUGGUUGCACAUCCGAAGGGUGAGGAUUU | CGGGUGGUUGCACAUCCGAAGGGUGAGGAUUUA |
| | | | AUUCACUCACUAAUACUACAAAUGGAAAAAUU | UUCACUCACUAAUACUACAAAUGGAAAAAUUUA |
| | | | UAAAGGAAAAUGUAAAUGCAACAGGUGGCAGC | AAGGAAAAUGUAAAUGCAAC (SEQ ID NO: 750) |
| | | | GGCUUGAUCC (SEQ ID NO: 753) | |
| PL8187 | 240 | 3.144 | CGGGUGGUUGCACAUCCGAAGGGUGAGGAUUU | CGGGUGGUUGCACAUCCGAAGGGUGAGGAUUUA |
| | | | AUUCACUCACUAAUACUACAAAUGGAAAAAUU | UUCACUCACUAAUACUACAAAUGGAAAAAUUUA |
| | | | UAAAGGAAAAUGUAAAUGCAACGCCAAAGGCA | AAGGAAAAUGUAAAUGCAAC (SEQ ID NO: 750) |
| | | | UGUGAGGUAC (SEQ ID NO: 754) | |
| PL8192 | 240 | 6.771 | CGGGUGGUUGCACAUCCGAAGGGUGAGGAUUU | CGGGUGGUUGCACAUCCGAAGGGUGAGGAUUUA |
| | | | AUUCACUCACUAAUACUACAAAUGGAAAAAUU | UUCACUCACUAAUACUACAAAUGGAAAAAUUUA |
| | | | UAAAGGAAAAUGUAAAUGCAACGGGCAGCUGG | AAGGAAAAUGUAAAUGCAAC (SEQ ID NO: 750) |
| | | | UGGAAUUUUU (SEQ ID NO: 755 ) | |
| PL8194 | 240 | 12.361 | CGGGUGGUUGCACAUCCGAAGGGUGAGGAUUU | CGGGUGGUUGCACAUCCGAAGGGUGAGGAUUUA |
| | | | AUUCACUCACUAAUACUACAAAUGGAAAAAUU | UUCACUCACUAAUACUACAAAUGGAAAAAUUUA |
| | | | UAAAGGAAAAUGUAAAUGCAACCAGGUUGAGA | AAGGAAAAUGUAAAUGCAAC (SEQ ID NO: 750) |
| | | | ACUUGUUGCU (SEQ ID NO: 756) | |
| PL8195 | 240 | 4.499 | CGGGUGGUUGCACAUCCGAAGGGUGAGGAUUU | CGGGUGGUUGCACAUCCGAAGGGUGAGGAUUUA |
| | | | AUUCACUCACUAAUACUACAAAUGGAAAAAUU | UUCACUCACUAAUACUACAAAUGGAAAAAUUUA |
| | | | UAAAGGAAAAUGUAAAUGCAACUCCCGACCCU | AAGGAAAAUGUAAAUGCAAC (SEQ ID NO: 750) |
| | | | CCCGUCGCCG (SEQ ID NO: 757) | |
| PL8197 | 240 | 8.178 | CGGGUGGUUGCACAUCCGAAGGGUGAGGAUUU | CGGGUGGUUGCACAUCCGAAGGGUGAGGAUUUA |
| | | | AUUCACUCACUAAUACUACAAAUGGAAAAAUU | UUCACUCACUAAUACUACAAAUGGAAAAAUUUA |
| | | | UAAAGGAAAAUGUAAAUGCAACGGACGAGCCU | AAGGAAAAUGUAAAUGCAAC (SEQ ID NO: 750) |
| | | | ACCCGUCCCC (SEQ ID NO: 758) | |
| PL8198 | 240 | 1.089 | CGGGUGGUUGCACAUCCGAAGGGUGAGGAUUU | CGGGUGGUUGCACAUCCGAAGGGUGAGGAUUUA |
| | | | AUUCACUCACUAAUACUACAAAUGGAAAAAUU | UUCACUCACUAAUACUACAAAUGGAAAAAUUUA |
| | | | UAAAGGAAAAUGUAAAUGCAACUCGGGGGGCG | AAGGAAAAUGUAAAUGCAAC (SEQ ID NO: 750) |
| | | | GGGGGGAGAA (SEQ ID NO: 759) | |
| PL8216 | 16 | 0.941 | UGAAAUAUUGAUUGAGGUCGCCGUUUACGUUG | UGAAAUAUUGAUUGAGGUCGCCGUUUACGUUGC |
| | | | CGUCACAAGGGCGCGCGGGCGACCGAAGGCCG | GUCACAAGGGCGCGCGGGCGACCGAAGGCCGAUC |
| | | | AUCUGUACGGCCUGCAGGUUGAGAAGGCACAU | UGUACGGCCUGCAGGUUGAGAAGGCACAUAUUA |
| | | | AUUAGAGGAAAAUUGCUUCCCUUUGUGUUCGC | GAGGAAAAUUGCUUCCCUUUGUGUUCGCUCACC |
| | | | UCACCGAGUAUUCCUUGUUAUUUGCGGCAAGA | GAGUAUUCCUUGUUAUUUGCGGCAAGAAACUGU |
| | | | AACUGUCUUAAUUGUUUGAAAGGGUGCAUACA | CUUAAUUGUUUGAAAGGGUGCAUACAGG (SEQ |
| | | | GGACCUCAAAUUCCUCCUCAGA (SEQ ID NO: | ID NO: 761) |
| | | | 760) | |
| PL8240 | 14 | 0.620 | AAGCAACCGCGUACACGCGGACGAACGGCCGA | AAGCAACCGCGUACACGCGGACGAACGGCCGACC |
| | | | CCUGCUCGGCCUGAAGGUUGAGAAGGUUAUGU | UGCUCGGCCUGAAGGUUGAGAAGGUUAUGUAUA |
| | | | AUAAGAGGAGAAAAUCCCCCUUCAUAAUCGCU | AGAGGAGAAAAUCCCCCUUCAUAAUCGCUCACCA |
| | | | CACCAAGCUCCCAAUUUACAUAUUUUGAAAGG | AGCUCCCAAUUUACAUAUUUUGAAAGGGCGCAU |
| | | | GCGCAUGCAGGACCUCAAAUUCCUCCUCAGA | GCAGG (SEQ ID NO: 763) |
| | | | (SEQ ID NO: 762) | |
| PL8252 | 15 | 0.693 | UAUUGCGCUAGCCAUAAUGGCAAUCGCGUACA | UAUUGCGCUAGCCAUAAUGGCAAUCGCGUACAG |
| | | | GGCAACUGAAGGCCGACCUGUACGGCCUUAAG | GCAACUGAAGGCCGACCUGUACGGCCUUAAGGU |
| | | | GUUGAGAAGGCACAUGUAAGUGGAAAAAUGCU | UGAGAAGGCACAUGUAAGUGGAAAAAUGCUUUC |
| | | | UUCCCGUUGUGUUCGCUCACCAAGCACACACG | CCGUUGUGUUCGCUCACCAAGCACACACGUUUGA |
| | | | UUUGAAAUGUGGGGUGCUUACAGGAUCCAACA | AAUGUGGGGUGCUUACAGG (SEQ ID NO: 765) |
| | | | GCCAGGGGGACU (SEQ ID NO: 764) | |
| PL8253 | 15 | 1.435 | UAUUGCGCUAGCCAUAAUGGCAAUCGCGUACA | UAUUGCGCUAGCCAUAAUGGCAAUCGCGUACAG |
| | | | GGCAACUGAAGGCCGACCUGUACGGCCUUAAG | GCAACUGAAGGCCGACCUGUACGGCCUUAAGGU |
| | | | GUUGAGAAGGCACAUGUAAGUGGAAAAAUGCU | UGAGAAGGCACAUGUAAGUGGAAAAAUGCUUUC |
| | | | UUCCCGUUGUGUUCGCUCACCAAGCACACACG | CCGUUGUGUUCGCUCACCAAGCACACACGUUUGA |
| | | | UUUGAAAUGUGGGGUGCUUACAGGAUCCUGUG | AAUGUGGGGUGCUUACAGG (SEQ ID NO: 765) |
| | | | UGCCCCUGAUGC (SEQ ID NO: 766) | |
| PL8264 | 15 | 0.543 | UAUUGCGCUAGCCAUAAUGGCAAUCGCGUACA | UAUUGCGCUAGCCAUAAUGGCAAUCGCGUACAG |
| | | | GGCAACUGAAGGCCGACCUGUACGGCCUUAAG | GCAACUGAAGGCCGACCUGUACGGCCUUAAGGU |
| | | | GUUGAGAAGGCACAUGUAAGUGGAAAAAUGCU | UGAGAAGGCACAUGUAAGUGGAAAAAUGCUUUC |
| | | | UUCCCGUUGUGUUCGCUCACCAAGCACACACG | CCGUUGUGUUCGCUCACCAAGCACACACGUUUGA |
| | | | UUUGAAAUGUGGGGUGCUUACAGGACCUCAAA | AAUGUGGGGUGCUUACAGG (SEQ ID NO: 765) |
| | | | UUCCUCCUCAGA (SEQ ID NO: 767) | |
| PL8272 | 239 | 3.642 | AGUAUGAGGCCGCCGAUAAACGUUUCGCUAGC | AGUAUGAGGCCGCCGAUAAACGUUUCGCUAGCC |
| | | | CUGACAGGCAAUCGCGAACGGGCGGCUGAAGG | UGACAGGCAAUCGCGAACGGGCGGCUGAAGGCC |
| | | | CCGACCUGUACGGCCUGAAGGAUGAGAAGGCA | GACCUGUACGGCCUGAAGGAUGAGAAGGCACAU |
| | | | CAUAUAAGUGGAAAAUUGCUUCCCGUUGUGUU | AUAAGUGGAAAAUUGCUUCCCGUUGUGUUCGCU |
| | | | CGCUCACCAGGUACUCCUUAAUUUGAAAGCUG | CACCAGGUACUCCUUAAUUUGAAAGCUGCAAGA |
| | | | CAAGAGCUCCUAAUUUGAGGGGUGCAUACAGG | GCUCCUAAUUUGAGGGGUGCAUACAGG (SEQ ID |
| | | | AGAAAGAGAGAGUAGCGCGA (SEQ ID NO: 768) | NO: 769) |
| PL8287 | 239 | 0.995 | AGUAUGAGGCCGCCGAUAAACGUUUCGCUAGC | AGUAUGAGGCCGCCGAUAAACGUUUCGCUAGCC |
| | | | CUGACAGGCAAUCGCGAACGGGCGGCUGAAGG | UGACAGGCAAUCGCGAACGGGCGGCUGAAGGCC |
| | | | CCGACCUGUACGGCCUGAAGGAUGAGAAGGCA | GACCUGUACGGCCUGAAGGAUGAGAAGGCACAU |
| | | | CAUAUAAGUGGAAAAUUGCUUCCCGUUGUGUU | AUAAGUGGAAAAUUGCUUCCCGUUGUGUUCGCU |
| | | | CGCUCACCAGGUACUCCUUAAUUUGAAAGCUG | CACCAGGUACUCCUUAAUUUGAAAGCUGCAAGA |
| | | | CAAGAGCUCCUAAUUUGAGGGGUGCAUACAGG | GCUCCUAAUUUGAGGGGUGCAUACAGG (SEQ ID |
| | | | UACUAUGGGAUCAAGCCGCU (SEQ ID NO: 770) | NO: 769) |
| PL8288 | 239 | 1.598 | AGUAUGAGGCCGCCGAUAAACGUUUCGCUAGC | AGUAUGAGGCCGCCGAUAAACGUUUCGCUAGCC |
| | | | CUGACAGGCAAUCGCGAACGGGCGGCUGAAGG | UGACAGGCAAUCGCGAACGGGCGGCUGAAGGCC |
| | | | CCGACCUGUACGGCCUGAAGGAUGAGAAGGCA | GACCUGUACGGCCUGAAGGAUGAGAAGGCACAU |
| | | | CAUAUAAGUGGAAAAUUGCUUCCCGUUGUGUU | AUAAGUGGAAAAUUGCUUCCCGUUGUGUUCGCU |
| | | | CGCUCACCAGGUACUCCUUAAUUUGAAAGCUG | CACCAGGUACUCCUUAAUUUGAAAGCUGCAAGA |
| | | | CAAGAGCUCCUAAUUUGAGGGGUGCAUACAGG | GCUCCUAAUUUGAGGGGUGCAUACAGG (SEQ ID |
| | | | ACCUCAAAUUCCUCCUCAGA (SEQ ID NO: 771) | NO: 769) |
| PL8369 | 232 | 5.619 | AACUGCCGGUAAGAUUACGAUAGCCGAAAGGC | AACUGCCGGUAAGAUUACGAUAGCCGAAAGGCA |
| | | | AAUUGCGUAUGCGGCAGUUAAGGCCGGCUCGA | AUUGCGUAUGCGGCAGUUAAGGCCGGCUCGAAC |
| | | | ACGGCCUGAAGGUUGAGUUUAAAGUCACAUAU | GGCCUGAAGGUUGAGUUUAAAGUCACAUAUAAG |
| | | | AAGCGGAAAAAUCAGAUUUCCCAUUGUGUUCG | CGGAAAAAUCAGAUUUCCCAUUGUGUUCGCUCA |
| | | | CUCACCAAUACGCGCAAAUUUGAAAAUGUAGU | CCAAUACGCGCAAAUUUGAAAAUGUAGUUCGAG |
| | | | UCGAGGUCCAGGCCUAAGGAAGGAGU (SEQ ID | G (SEQ ID NO: 773) |
| | | | NO: 772) | |
| PL8375 | 232 | 5.505 | AACUGCCGGUAAGAUUACGAUAGCCGAAAGGC | AACUGCCGGUAAGAUUACGAUAGCCGAAAGGCA |
| | | | AAUUGCGUAUGCGGCAGUUAAGGCCGGCUCGA | AUUGCGUAUGCGGCAGUUAAGGCCGGCUCGAAC |
| | | | ACGGCCUGAAGGUUGAGUUUAAAGUCACAUAU | GGCCUGAAGGUUGAGUUUAAAGUCACAUAUAAG |
| | | | AAGCGGAAAAAUCAGAUUUCCCAUUGUGUUCG | CGGAAAAAUCAGAUUUCCCAUUGUGUUCGCUCA |
| | | | CUCACCAAUACGCGCAAAUUUGAAAAUGUAGU | CCAAUACGCGCAAAUUUGAAAAUGUAGUUCGAG |
| | | | UCGAGGUUGGUGAAGUAGGGCCUCCU (SEQ ID | G (SEQ ID NO: 773) |
| | | | NO: 774) | |
| PL8378 | 232 | 0.994 | AACUGCCGGUAAGAUUACGAUAGCCGAAAGGC | AACUGCCGGUAAGAUUACGAUAGCCGAAAGGCA |
| | | | AAUUGCGUAUGCGGCAGUUAAGGCCGGCUCGA | AUUGCGUAUGCGGCAGUUAAGGCCGGCUCGAAC |
| | | | ACGGCCUGAAGGUUGAGUUUAAAGUCACAUAU | GGCCUGAAGGUUGAGUUUAAAGUCACAUAUAAG |
| | | | AAGCGGAAAAAUCAGAUUUCCCAUUGUGUUCG | CGGAAAAAUCAGAUUUCCCAUUGUGUUCGCUCA |
| | | | CUCACCAAUACGCGCAAAUUUGAAAAUGUAGU | |
| | | | UCGAGGAAUUCCGGGUAUCCCAGGAG (SEQ ID | CCAAUACGCGCAAAUUUGAAAAUGUAGUUCGAG |
| | | | NO: 775) | G (SEQ ID NO: 773) |
| PL8379 | 232 | 0.767 | AACUGCCGGUAAGAUUACGAUAGCCGAAAGGC | AACUGCCGGUAAGAUUACGAUAGCCGAAAGGCA |
| | | | AAUUGCGUAUGCGGCAGUUAAGGCCGGCUCGA | AUUGCGUAUGCGGCAGUUAAGGCCGGCUCGAAC |
| | | | ACGGCCUGAAGGUUGAGUUUAAAGUCACAUAU | GGCCUGAAGGUUGAGUUUAAAGUCACAUAUAAG |
| | | | AAGCGGAAAAAUCAGAUUUCCCAUUGUGUUCG | CGGAAAAAUCAGAUUUCCCAUUGUGUUCGCUCA |
| | | | CUCACCAAUACGCGCAAAUUUGAAAAUGUAGU | CCAAUACGCGCAAAUUUGAAAAUGUAGUUCGAG |
| | | | UCGAGGUUCAUUGCAGAAAGAGACAU (SEQ ID | G (SEQ ID NO: 773) |
| | | | NO: 776) | |
| PL8383 | 232 | 0.505 | AACUGCCGGUAAGAUUACGAUAGCCGAAAGGC | AACUGCCGGUAAGAUUACGAUAGCCGAAAGGCA |
| | | | AAUUGCGUAUGCGGCAGUUAAGGCCGGCUCGA | AUUGCGUAUGCGGCAGUUAAGGCCGGCUCGAAC |
| | | | ACGGCCUGAAGGUUGAGUUUAAAGUCACAUAU | GGCCUGAAGGUUGAGUUUAAAGUCACAUAUAAG |
| | | | AAGCGGAAAAAUCAGAUUUCCCAUUGUGUUCG | CGGAAAAAUCAGAUUUCCCAUUGUGUUCGCUCA |
| | | | CUCACCAAUACGCGCAAAUUUGAAAAUGUAGU | CCAAUACGCGCAAAUUUGAAAAUGUAGUUCGAG |
| | | | UCGAGGAGAUCACGAGGAAUACAACA(SEQ ID | G (SEQ ID NO: 773) |
| | | | NO: 777) | |
| PL8386 | 232 | 3.165 | AACUGCCGGUAAGAUUACGAUAGCCGAAAGGC | AACUGCCGGUAAGAUUACGAUAGCCGAAAGGCA |
| | | | AAUUGCGUAUGCGGCAGUUAAGGCCGGCUCGA | AUUGCGUAUGCGGCAGUUAAGGCCGGCUCGAAC |
| | | | ACGGCCUGAAGGUUGAGUUUAAAGUCACAUAU | GGCCUGAAGGUUGAGUUUAAAGUCACAUAUAAG |
| | | | AAGCGGAAAAAUCAGAUUUCCCAUUGUGUUCG | CGGAAAAAUCAGAUUUCCCAUUGUGUUCGCUCA |
| | | | CUCACCAAUACGCGCAAAUUUGAAAAUGUAGU | CCAAUACGCGCAAAUUUGAAAAUGUAGUUCGAG |
| | | | UCGAGGCAGCCGGGAGGAGCAGCAAG (SEQ ID | G (SEQ ID NO: 773) |
| | | | NO: 778) | |
| PL8427 | 231 | 0.832 | ACCGAGGCCGCGAAAAACACAACGCUAGCCGA | ACCGAGGCCGCGAAAAACACAACGCUAGCCGAAA |
| | | | AAGGCAAUCGCGGGUGCGCGGCCGAAGGCCGA | GGCAAUCGCGGGUGCGCGGCCGAAGGCCGACUA |
| | | | CUAGAGCGGCCUGAAGGUUGAGAAGCGUGCAU | GAGCGGCCUGAAGGUUGAGAAGCGUGCAUGUAA |
| | | | GUAAACGGCAGAAAAAAUGCCUUUUGUACGCG | ACGGCAGAAAAAAUGCCUUUUGUACGCGCUCAC |
| | | | CUCACCGAACACGUCUGAGCGGUUUGAAAGGU | CGAACACGUCUGAGCGGUUUGAAAGGUGUGCUC |
| | | | GUGCUCUAGGACUAUGGGAUCAAGCCGCUG | UAGG (SEQ ID NO: 780) |
| | | | (SEQ ID NO: 779) | |
| PL5995 | 228 | 23.175 | GGGGUUGUUGGAAACCCUUAUGCUGAGGGAUU | GGGGUUGUUGGAAACCCUUAUGCUGAGGGAUUA |
| | | | AUUCCACUCGGUAAGUACCUUAAAUAGUUAUA | UUCCACUCGGUAAGUACCUUAAAUAGUUAUAGA |
| | | | GAAAGAUGUAAAUCAUCUAUAAAAGAAAGGUA | AAGAUGUAAAUCAUCUAUAAAAGAAAGGUACAU |
| | | | CAUCCAACGCCUGGAGGCUAUCCAGCGU (SEQ | CCAAC (SEQ ID NO: 782) |
| | | | ID NO: 781) | |
| PL6002 | 228 | 0.564 | GGGGUUGUUGGAAACCCUUAUGCUGAGGGAUU | GGGGUUGUUGGAAACCCUUAUGCUGAGGGAUUA |
| | | | AUUCCACUCGGUAAGUACCUUAAAUAGUUAUA | UUCCACUCGGUAAGUACCUUAAAUAGUUAUAGA |
| | | | GAAAGAUGUAAAUCAUCUAUAAAAGAAAGGUA | AAGAUGUAAAUCAUCUAUAAAAGAAAGGUACAU |
| | | | CAUCCAACACUUUCCAUUCUCUGCUGGA(SEQ | CCAAC (SEQ ID NO: 782) |
| | | | ID NO: 783) | |
| PL8069 | 213 | 2.442 | AAGAUAUGAAUAGGAGUAUUCCUAUGGGGCAG | AAGAUAUGAAUAGGAGUAUUCCUAUGGGGCAGU |
| | | | UUGGUUGCCCUUAGCCUGAGGUAUUUAAUGCA | UGGUUGCCCUUAGCCUGAGGUAUUUAAUGCACU |
| | | | CUCGGGAAGUACUUUCAACAGUAUCCGUUAGA | CGGGAAGUACUUUCAACAGUAUCCGUUAGAAAA |
| | | | AAAGGUACAUCCAACGUGUUGCUGGAGGGGGC | GGUACAUCCAAC (SEQ ID NO: 785) |
| | | | CUU (SEQ ID NO: 784) | |

TABLE 35
D2S effectors and targets PAM sequences

| Enzyme | |
|---|---|
| SEQ | |
| ID NO | PAM sequence(s) |
| 220 | TCG(SEQ ID NO: 156) |
| 233 | TTR (SEQ ID NO: 786); TR (SEQ ID NO: 787) |
| 240 | TTR (SEQ ID NO: 786); TTTR (SEQ ID NO: 788) |
| 16 | CC (SEQ ID NO: 155) |
| 14 | CC (SEQ ID NO: 155) |
| 15 | CC (SEQ ID NO: 155) |
| 239 | CC (SEQ ID NO: 155) |
| 232 | TTTYC (SEQ ID NO: 789) |
| 231 | CCN (SEQ ID NO: 790) |
| 228 | TG (SEQ ID NO: 791); TNTG (SEQ ID NO: 368) |
| 213 | GGTYG (SEQ ID NO: 792) |

### Example 23: Effector Protein Tags

[1109] CasM.19952 (SEQ ID NO: 23) was purified with a TEV-cleavable MBP tag, which has the TEV cleavage site of ENLYFQSNA (SEQ ID NO: 811). Proteins purified with a TEV-cleavable MBP tag may be useful for various applications, including but not limited to modifying a cell ex vivo. TEV cleavage typically happens before it is introduced in the cell. After TEV cleavage, the protein's N terminus retains the three additional amino acids (SerAsnAla; SNA). This is true regardless of whether NLSs are also present.

[1110] Similarly, effector proteins with different tags including T2A, His, FLAG and GFP, were developed for various purposes. Exemplary sequences are described in Tables 36 and 37. In particular, examples of the tagged constructs are shown in Table 36 and individual components of tagged constructs are shown in Table 37. The components of the tagged constructs shown in Table 37 can be applied to any D2S effector protein disclosed herein for example to SEQ ID NOs: 1-45, 202-293, or 728-731.

TABLE 36
Tagged Construct Examples

| | SEQ ID | |
|---|---|---|
| Description | NO: | Amino Acid Sequence |
| Full Uncleaved TEV- | 812 | MKSSinnnnniHHiniGSSMKIEEGKLVIWINGDKGYNGLAEVGKKFEKDTGIKVTVEH |
| Cleavable and MBP | | PDKLEEKFPQVAATGDGPDIIFWAHDRFGGYAQSGLLAEITPDKAFQDKLYPFTWDAV |
| tag sequence of | | RYNGKLIAYPIAVEALSLIYNKDLLPNPPKTWEEIPALDKELKAKGKSALMFNLQEPYFT |
| CasM.19952 | | WPLIAADGGYAFKYENGKYDIKDVGVDNAGAKAGLTFLVDLIKNKHMNADTDYSIAE |
| | | AAFNKGETAMTINGPWAWSNIDTSKVNYGVTVLPTFKGQPSKPFVGVLSAGINAASPN |
| | | KELAKEFLENYLLTDEGLEAVNKDKPLGAVALKSYEEELAKDPRIAATMENAQKGEIM |
| | | PNIPQMSAFWYAVRTAVINAASGRQTVDEALKDAQTNSSSNNNNNNNNNNLGIEENLY |
| | | FQSNAMPTITRKIELTLLTEGLSEEQRKEQWGLLYHINDNLYKAANNISSKLYLDDHVS |
| | | SMVRMKHAEYLSLLKELARAEKQKTPDADAIAELRKKVAAAEKEMTDQEHAICKYAT |
| | | EMSTQSLSYRFATELETNIFAKILDCLKQGVFATFNSDARDVKRGERAIRNYKKGMPIPF |
| | | AWDKSLRIEKDNKDFYLRWYNGLRFLFNFGKDRSNNRLIVERCLKMDADYDGEYKLC |
| | | NSSIQIAKREGKTKLFLLLVVKIPQEHVELNKKVVVGVDLGINVPAYVATNITEERKAIG |
| | | DREHFLNSRMAFQRRYKSLQRLRGTAGGKGRAKKLEPLERLRKAEHNWVHTQNHLFS |
| | | REVVDFAVKSHAATIHMEDLSGFGKDNDGNADERKEFVLRNWSYYELQNMIAYKAA |
| | | KYGIKVEKIHPAYTSKTCSWCGQLGFREGVTF1CENPECKQCGEKVHADYNAARNLAN |
| | | SKDIIKKNE |
| Full cleaved TEV- | 813 | SNAMPTITRKIELTLLTEGLSEEQRKEQWGLLYHINDNLYKAANNISSKLYLDDHVSSM |
| Cleavable and MBP | | VRMKHAEYLSLLKELARAEKQKTPDADAIAELRKKVAAAEKEMTDQEHAICKYATEM |
| tag sequence of | | STQSLSYRFATELETNIFAKILDCLKQGVFATFNSDARDVKRGERAIRNYKKGMPIPFA |
| CasM.19952 | | WDKSLRIEKDNKDFYLRWYNGLRFLFNFGKDRSNNRLIVERCLKMDADYDGEYKLCN |
| | | SSIQIAKREGKTKLFLLLVVKIPQEHVELNKKVVVGVDLGINVPAYVATNITEERKAIGD |
| | | REHFLNSRMAFQRRYKSLQRLRGTAGGKGRAKKLEPLERLRKAEHNWVHTQNHLFSR |
| | | EVVDFAVKSHAATIHMEDLSGFGKDNDGNADERKEFVLRNWSYYELQNMIAYKAAK |
| | | YGIKVEKIHPAYTSKTCSWCGQLGFREGVTFICENPECKQCGEKVHADYNAARNIANS |
| | | KDIIKKNE |
| Full sequence of His | 814 | MKSSHHHHHHHGSSMPTITRKIELTLLTEGLSEEQRKEQWGLLYHINDNLYKAANNISS |
| and GFP tagged | | KLYLDDHVSSMVRMKHAEYLSLLKELARAEKQKTPDADAIAELRKKVAAAEKEMTD |
| CasM.19952 | | QEHAICKYATEMSTQSLSYRFATELETNIFAKILDCLKQGVFATFNSDARDVKRGERAIR |
| | | NYKKGMPIPFAWDKSLRIEKDNKDFYLRWYNGLRFLFNFGKDRSNNRLIVERCLKMD |
| | | ADYDGEYKLCNSSIQIAKREGKTKLFLLLVVKIPQEHVELNKKVVVGVDLGINVPAYV |
| | | ATNITEERKAIGDREHFLNSRMAFQRRYKSLQRLRGTAGGKGRAKKLEPLERLRKAEH |
| | | NWVHTQNHLFSREVVDFAVKSHAATIHMEDLSGFGKDNDGNADERKEFVLRNWSYY |
| | | ELQNMIAYKAAKYGIKVEKIHPAYTSKTCSWCGQLGFREGVTFICENPECKQCGEKVH |
| | | ADYNAARNIANSKDIIKKNEGSDGGSGGGSTSRDHMVLHEYVNAAGIT |
| Full uncleaved | 815 | MDYKDHDGDYKDHDIDYKDDDDKMAPKKKRKVGIHGVPAAMPTITRKIELTLLTEGL |
| sequence of T2A | | SEEQRKEQWGLLYHINDNLYKAANNISSKLYLDDHVSSMVRMKHAEYLSLLKELARA |
| tagged CasM.19952 | | EKQKTPDADAIAELRKKVAAAEKEMTDQEHAICKYATEMSTQSLSYRFATELETNIFA |
| | | KILDCLKQGVFATFNSDARDVKRGERAIRNYKKGMPIPFAWDKSLRIEKDNKDFYLRW |
| | | YNGLRFLFNFGKDRSNNRLIVERCLKMDADYDGEYKLCNSSIQIAKREGKTKLFLLLVV |
| | | KIPQEHVELNKKVVVGVDLGINVPAYVATNITEERKAIGDREHFLNSRMAFQRRYKSL |
| | | QRLRGTAGGKGRAKKLEPLERLRKAEHNWVHTQNHLFSREVVDFAVKSHAATIHMED |
| | | LSGFGKDNDGNADERKEFVLRNWSYYELQNMIAYKAAKYGIKVEKIHPAYTSKTCSW |
| | | CGQLGFREGVTFICENPECKQCGEKVHADYNAARNIANSKDIIKKNEKRPAATKKAGQ |
| | | AKKKKEFGSGEGRGSLLTCGDVEENPGP |
| Cleaved sequence of | 816 | MDYKDHDGDYKDHDIDYKDDDDKMAPKKKRKVGIHGVPAAMPTITRKIELTLLTEGL |
| T2A tagged CasM.19952 | | SEEQRKEQWGLLYHINDNLYKAANNISSKLYLDDHVSSMVRMKHAEYLSLLKELARA |
| | | EKQKTPDADAIAELRKKVAAAEKEMTDQEHAICKYATEMSTQSLSYRFATELETNIFA |
| | | KILDCLKQGVFATFNSDARDVKRGERAIRNYKKGMPIPFAWDKSLRIEKDNKDFYLRW |
| | | YNGLRFLFNFGKDRSNNRLIVERCLKMDADYDGEYKLCNSSIQIAKREGKTKLFLLLVV |
| | | KIPQEHVELNKKVVVGVDLGINVPAYVATNITEERKAIGDREHFLNSRMAFQRRYKSL |
| | | QRLRGTAGGKGRAKKLEPLERLRKAEHNWVHTQNHLFSREVVDFAVKSHAATIHMED |
| | | LSGFGKDNDGNADERKEFVLRNWSYYELQNMIAYKAAKYGIKVEKIHPAYTSKTCSW |
| | | CGQLGFREGVTFICENPECKQCGEKVHADYNAARNIANSKDIIKKNEKRPAATKKAGQ |
| | | AKKKKEFGSGEGRGSLLTCGDVEENPG |

TABLE 37
Components of Tagged Constructs

| | SEQ ID | |
|---|---|---|
| Description | NO: | Amino Acid Sequence |
| N-terminus sequence | 817 | MKSSHHHHHHHHHHGSSMKIEEGKLVIWINGDKGYNGLAEVGKKFEKDTGIKVTVEH |
| of TEV-cleavable | | PDKLEEKFPQVAATGDGPDIIFWAHDRFGGYAQSGLLAEITPDKAFQDKLYPFTWDAV |
| | | RYNGKLIAYPIAVEALSLIYNKDLLPNPPKTWEEIPALDKELKAKGKSALMFNLQEPYFT |
| MBP tag before | | WPLIAADGGYAFKYENGKYDIKDVGVDNAGAKAGLTFLVDLIKNKHMNADTDYSIAE |
| CasM.19952 | | AAFNKGETAMTINGPWAWSNIDTSKVNYGVTVLPTFKGQPSKPFVGVLSAGINAASPN |
| | | KELAKEFLENYLLTDEGLEAVNKDKPLGAVALKSYEEELAKDPRIAATMENAQKGEIM |
| | | PNIPQMSAFWYAVRTAVINAASGRQTVDEALKDAQTNSSSNNNNNNNNNNLGIEENLY |
| | | FQSNA |
| 10X His tag | 818 | HHHHHHHHHH |
| MBP tag | 819 | MKIEEGKLVIWINGDKGYNGLAEVGKKFEKDTGIKVTVEHPDKLEEKFPQVAATGDGP |
| | | DIIFWAHDRFGGYAQSGLLAEITPDKAFQDKLYPFTWDAVRYNGKLIAYPIAVEALSLI |
| | | YNKDLLPNPPKTWEEIPALDKELKAKGKSALMFNLQEPYFTWPLIAADGGYAFKYENG |
| | | KYDIKDVGVDNAGAKAGLTFLVDLIKNKHMNADTDYSIAEAAFNKGETAMTINGPWA |
| | | WSNIDTSKVNYGVTVLPTFKGQPSKPFVGVLSAGINAASPNKELAKEFLENYLLTDEGL |
| | | EAVNKDKPLGAVALKSYEEELAKDPRIAATMENAQKGEIMPNIPQMSAFWYAVRTAVI |
| | | NAASGRQTVDEALKDAQT |
| N-terminus His6 tag | 820 | MKSSHHHHHHHGSS |
| plus linker before | | |
| CasM.19952 | | |
| C-terminus Linker- | 821 | GSDGGSGGGSTSRDHMVLHEYVNAAGIT |
| GFP11 tag after | | |
| CasM.19952 | | |
| N terminus of T2A | 822 | MDYKDHDGDYKDHDIDYKDDDDKMAPKKKRKVGIHGVPAA |
| tagged effector protein | | |
| 3x FLAG tag of N | 823 | MDYKDHDGDYKDHDIDYKDDDDK |
| terminus of T2A | | |
| tagged effector protein | | |
| SV40 NLS sequence | 712 | PKKKRKV |
| ofN terminus of T2A | | |
| tagged effector protein | | |
| C terminus of T2A | 824 | KRPAATKKAGQAKKKKEFGSGEGRGSLLTCGDVEENPGP |
| tagged effector protein | | |
| NLS (nucleoplasmin) | 825 | KRPAATKKAGQAKKKK |
| of C terminus of T2A | | |
| tagged effector protein | | |
| T2A self-cleaving | 826 | GSGEGRGSLLTCGDVEENPGP |
| peptide sequence | | |

### Example 24: CasM.19952 Demonstrates Blunt Cutting of dsDNA

[1111] A CasM.19952 (SEQ ID NO: 23) sgRNA complex (200 nM) was incubated with a target nucleic acid having a PAM of GTCG (10 nM) at 37 degrees Celsius for 1 hour in CutSmart buffer. Purified and amplified fragments were subjected to Sanger sequencing using multiple forward and reverse primers to read both the target and non target strands. FIG. 12 shows the sequencing reads which were interpreted as blunt cutting.

### Example 25: D2S Sequence Similarity

[1112] The following method was used to calculate the similarity of D2S enzymes disclosed herein to CasM.19952, as well as the similarity of sequences within each D2S enzyme sequence to the multilevel consensus sequence/PROSITE motifs described in Example 21.

[1113] The BLOSUM62 similarity matrix (Henikoff & Henikoff, 1992) was transformed so that any value ≥1 was replaced with +1 and any value ≤0 was replaced with 0. For example, the Ile to Leu substitution is scored at +2.0; in the transformed matrix, it is scored at +1. This transformation allows the calculation of percent similarity, rather than a similarity score.

[1114] For similarity over the MEME motifs, the multilevel consensus sequence (or PROSITE motif sequence) was used to identify how strongly each motif was conserved. In calculating the similarity of a motif sequence, the second and third levels of the multilevel sequence were treated as equivalent to the top level. Alternately, when comparing two full protein sequences, the proteins were aligned using pairwise MUSCLE alignment. Then, the similarity was scored at each residue and divided by the length of the alignment.

[1115] If a substitution could be treated as conservative with any of the amino acids in that position of the multilevel consensus sequence, +1 point was assigned. For example, given the multilevel consensus sequence:

[1116] RLG

[1117] YCK

. . . the test sequence QIQ would receive three points. This is because in the transformed BLOSUM62 matrix, each combination is scored as: Q-R: +1; Q-Y: +0; I-L: +1; I-C: +0; Q-G: +0; Q-K: +1 For each position, the highest score is used when calculating similarity.

[1118] The score over the length of the motif was divided by the length of the motif to provide the % similarity. In the example above, the % similarity would be 100%. This process is equivalent to the percent similarity calculation used by the Geneious Prime software given the parameters matrix=BLOSUM62 and threshold ≥1.

[1119] As shown in Table 41, there are 24 D2S enzymes with greater than 70% similarity to CasM.19952. Including CasM.19952, there are 26 sequences that have greater than 80% similarity to six or more of the MEME motifs, as shown in Table 42. Of these, 19 (excluding CasM.19952 itself) have greater than 80% similarity to the MEME motifs of CasM.19952. These are the same 19 sequences with at least 75% identity to CasM.19952 overall.

TABLE 41
D2S Effector Protein Sequence Similarity

| Effector Protein Name | % similarity to CasM.19952 |
|---|---|
| CasM.19952 | 100.0 |
| CasM.288480 | 97.9 |
| CasM.274559 | 96.8 |
| CasM.272451 | 95.9 |
| CasM.289206 | 92.3 |
| CasM.289248 | 92.3 |
| CasM.290598 | 92.9 |
| CasM.287826 | 92.1 |
| CasM.294406 | 89.8 |
| CasM.286251 | 90.2 |
| CasM.290816 | 90.4 |
| CasM.287936 | 90.0 |
| CasM.270012 | 91.2 |
| CasM.295231 | 90.9 |
| CasM.19498 | 87.4 |
| CasM.288450 | 90.8 |
| CasM.19948 | 88.5 |
| CasM.279423 | 89.5 |
| CasM.295071 | 86.4 |
| CasM.288668 | 86.1 |
| CasM.285333 | 78.0 |
| CasM.290380 | 76.3 |
| CasM.287128 | 76.0 |
| CasM.286678 | 75.7 |
| CasM.19924 | 71.6 |
| CasM.292139 | 65.1 |
| CasM.265291 | 58.9 |
| CasM.296640 | 60.4 |
| CasM.288712 | 59.0 |
| CasM.294190 | 57.5 |
| CasM.299584 | 57.0 |
| CasM.298446 | 50.6 |

TABLE 42
D2S MEME motif percent similarity

| Effector | | | | | | | |
|---|---|---|---|---|---|---|---|
| Protein | MEME_1 | MEME_2 | MEME_3 | MEME_4 | MEME_5 | MEME_6 | MEME_7 |
| CasM.19952 | 96.0 | 96.6 | 100.0 | 100.0 | 95.2 | 80.0 | 87.0 |
| CasM.288480 | 96.0 | 96.6 | 100.0 | 100.0 | 95.2 | 80.0 | 87.0 |
| CasM.274559 | 94.0 | 93.1 | 95.2 | 100.0 | 95.2 | 80.0 | 87.0 |
| CasM.272451 | 94.0 | 93.1 | 100.0 | 100.0 | 100.0 | 80.0 | 87.0 |
| CasM.289206 | 92.0 | 93.1 | 100.0 | 100.0 | 100.0 | 100.0 | 91.3 |
| CasM.289248 | 94.0 | 93.1 | 100.0 | 100.0 | 100.0 | 100.0 | 91.3 |
| CasM.290598 | 96.0 | 93.1 | 100.0 | 100.0 | 100.0 | 76.7 | 82.6 |
| CasM.287826 | 96.0 | 93.1 | 100.0 | 100.0 | 100.0 | 100.0 | 87.0 |
| CasM.294406 | 94.0 | 96.6 | 95.2 | 97.6 | 95.2 | 93.3 | 87.0 |
| CasM.286251 | 94.0 | 93.1 | 95.2 | 97.6 | 100.0 | 100.0 | 87.0 |
| CasM.290816 | 96.0 | 89.7 | 100.0 | 95.1 | 95.2 | 100.0 | 91.3 |
| CasM.287936 | 94.0 | 93.1 | 95.2 | 97.6 | 100.0 | 100.0 | 87.0 |
| CasM.270012 | 92.0 | 93.1 | 100.0 | 100.0 | 100.0 | 100.0 | 87.0 |
| CasM.295231 | 96.0 | 89.7 | 100.0 | 95.1 | 95.2 | 100.0 | 87.0 |
| CasM.19498 | 92.0 | 93.1 | 100.0 | 100.0 | 100.0 | 100.0 | 91.3 |
| CasM.288450 | 92.0 | 89.7 | 100.0 | 95.1 | 95.2 | 86.7 | 91.3 |
| CasM.19948 | 94.0 | 93.1 | 100.0 | 95.1 | 100.0 | 100.0 | 87.0 |
| CasM.279423 | 96.0 | 93.1 | 100.0 | 97.6 | 100.0 | 100.0 | 87.0 |
| CasM.295071 | 94.0 | 93.1 | 95.2 | 97.6 | 100.0 | 100.0 | 87.0 |
| CasM.288668 | 94.0 | 93.1 | 95.2 | 97.6 | 100.0 | 93.3 | 91.3 |
| CasM.285333 | 64.0 | 86.2 | 95.2 | 92.7 | 95.2 | 93.3 | 91.3 |
| CasM.290380 | 80.0 | 89.7 | 100.0 | 92.7 | 90.5 | 86.7 | 95.7 |
| CasM.287128 | 80.0 | 86.2 | 100.0 | 95.1 | 95.2 | 93.3 | 95.7 |
| CasM.286678 | 82.0 | 89.7 | 100.0 | 92.7 | 95.2 | 86.7 | 95.7 |
| CasM.19924 | 100.0 | 86.2 | 90.5 | 68.3 | 90.5 | 86.7 | 91.3 |
| CasM.292139 | 86.0 | 82.8 | 90.5 | 61.0 | 90.5 | 93.3 | 95.7 |
| CasM.265291 | 74.0 | 72.4 | 76.2 | 68.3 | 85.7 | 80.0 | 69.6 |
| CasM.296640 | 76.0 | 75.9 | 85.7 | 53.7 | 85.7 | 80.0 | 73.9 |
| CasM.294190 | 74.0 | 69.0 | 76.2 | 70.7 | 71.4 | 80.0 | 69.6 |
| CasM.288712 | 78.0 | 75.9 | 85.7 | 52.4 | 81.0 | 80.0 | 73.9 |
| CasM.299584 | 84.0 | 69.0 | 85.7 | 58.5 | 95.2 | 80.0 | 69.6 |
| CasM.298446 | 84.0 | 86.2 | 76.2 | | 71.4 | 93.3 | 73.9 |
| CasM.289802 | | 58.6 | 61.9 | 43.9 | 66.7 | | 60.9 |
| CasM.286285 | | 58.6 | | 53.7 | 81.0 | | 69.6 |
| CasM.20054 | 88.0 | 82.8 | 90.5 | | 76.2 | 93.3 | 78.3 |
| CasM.284933 | 80.0 | 89.7 | 85.7 | | 76.2 | 93.3 | 73.9 |
| CasM.289726 | | 58.6 | 57.1 | 46.3 | 61.9 | | 65.2 |
| CasM.294537 | 88.0 | 79.3 | 95.2 | | 81.0 | 80.0 | 69.6 |
| CasM.295929 | 86.0 | 82.8 | 90.5 | | 76.2 | 93.3 | 78.3 |
| CasM.298538 | 82.0 | 75.9 | 95.2 | 41.5 | 81.0 | 80.0 | 73.9 |
| CasM.286588 | 82.0 | 79.3 | 76.2 | 36.6 | 76.2 | 86.7 | 65.2 |
| CasM.19910 | 90.0 | 75.9 | 95.2 | | 81.0 | 86.7 | 69.6 |
| CasM.291449 | 84.0 | 75.9 | 90.5 | | 81.0 | 86.7 | 73.9 |
| CasM.293576 | 86.0 | 75.9 | 95.2 | | 85.7 | 80.0 | 65.2 |
| CasM.287896 | 84.0 | 82.8 | 90.5 | | 81.0 | 70.0 | 69.6 |
| CasM.293410 | 90.0 | 82.8 | 90.5 | 31.7 | 81.0 | 93.3 | 78.3 |
| CasM.295187 | 90.0 | 82.8 | 90.5 | 31.7 | 81.0 | 93.3 | 78.3 |
| CasM.297599 | 86.0 | 79.3 | 95.2 | | 85.7 | 86.7 | 63.0 |
| CasM.286910 | 88.0 | 79.3 | 95.2 | | 81.0 | 80.0 | 69.6 |
| CasM.296642 | 92.0 | 79.3 | 95.2 | | 71.4 | 93.3 | 73.9 |
| CasM.298612 | 82.0 | 79.3 | 95.2 | | 81.0 | 80.0 | 65.2 |
| CasM.274429 | 90.0 | 75.9 | 90.5 | 41.5 | 81.0 | 93.3 | 69.6 |
| CasM.282673 | 88.0 | 82.8 | 90.5 | | 85.7 | 86.7 | 78.3 |
| CasM.294601 | 72.0 | 72.4 | 76.2 | | | | 60.9 |
| CasM.294270 | 86.0 | 93.1 | 66.7 | | 76.2 | 100.0 | 65.2 |
| CasM.295105 | 90.0 | 89.7 | 95.2 | | 81.0 | 93.3 | 73.9 |
| CasM.19548 | 80.0 | 75.9 | 95.2 | 39.0 | 81.0 | 86.7 | 69.6 |
| CasM.287908 | 86.0 | 96.6 | 85.7 | | 81.0 | 93.3 | 78.3 |
| CasM.291507 | 86.0 | 86.2 | 95.2 | | 85.7 | 93.3 | 73.9 |
| CasM.283262 | 90.0 | 89.7 | 95.2 | | 81.0 | 93.3 | 73.9 |
| CasM.295201 | 88.0 | 79.3 | 95.2 | | 85.7 | 93.3 | 65.2 |
| CasM.284833 | 86.0 | 86.2 | 90.5 | | 81.0 | 93.3 | 73.9 |
| CasM.294655 | 88.0 | 89.7 | 90.5 | | 85.7 | 86.7 | 69.6 |
| CasM.277328 | 82.0 | 93.1 | 90.5 | | 85.7 | 93.3 | 73.9 |
| CasM.292335 | 84.0 | 82.8 | 85.7 | 41.5 | 85.7 | 80.0 | 69.6 |
| CasM.294491 | 86.0 | 93.1 | 85.7 | | 81.0 | 86.7 | 78.3 |
| CasM.293203 | 88.0 | 75.9 | 90.5 | | 90.5 | 86.7 | 73.9 |
| CasM.287700 | 88.0 | 89.7 | 95.2 | | 81.0 | 100.0 | 73.9 |
| CasM.280852 | 66.0 | 72.4 | 76.2 | | | 93.3 | 60.9 |
| CasM.293891 | 80.0 | 96.6 | 85.7 | | 81.0 | 93.3 | 69.6 |
| CasM.281060 | 84.0 | 93.1 | 66.7 | | 76.2 | 100.0 | 73.9 |
| CasM.299588 | 86.0 | 82.8 | 90.5 | | 76.2 | 100.0 | 69.6 |
| CasM.288518 | 82.0 | 93.1 | 90.5 | | 76.2 | 70.0 | 73.9 |
| CasM.280604 | 84.0 | 89.7 | 90.5 | | 85.7 | | 78.3 |
| CasM.298706 | 88.0 | 89.7 | 76.2 | | 71.4 | 93.3 | 73.9 |
| CasM.281050 | 88.0 | 75.9 | 95.2 | | 76.2 | 93.3 | 69.6 |
| CasM.277378 | 86.0 | 86.2 | 90.5 | | 81.0 | 93.3 | 73.9 |
| CasM.297894 | 88.0 | 89.7 | 76.2 | | 71.4 | 93.3 | 73.9 |
| CasM.295047 | 80.0 | 89.7 | 85.7 | | 76.2 | 93.3 | 73.9 |
| CasM.282952 | 88.0 | 89.7 | 85.7 | | 85.7 | 80.0 | 78.3 |
| CasM.298142 | 66.0 | 69.0 | 81.0 | | | | 60.9 |
| CasM.292901 | 72.0 | 72.4 | 59.5 | | | | 60.9 |
| CasM.298264 | | | 52.4 | | 38.1 | | |

[1120] While preferred embodiments of the present invention have been shown and described herein, it will be obvious to those skilled in the art that such embodiments are provided by way of example only. Numerous variations, changes, and substitutions will now occur to those skilled in the art without departing from the invention. It should be understood that various alternatives to the embodiments of the invention described herein may be employed in practicing the invention. It is intended that the following claims define the scope of the invention and that methods and structures within the scope of these claims and their equivalents be covered thereby.

1.-54. (canceled)

55. A system comprising components for detecting or modifying a target nucleic acid, wherein the components comprise:
a) a polypeptide, or a nucleic acid encoding the polypeptide, wherein the polypeptide comprises an amino acid sequence that is at least 85% identical to SEQ ID NO: 23; and
b) an engineered guide nucleic acid, or a nucleic acid encoding the engineered guide nucleic acid.

56. The system of claim 55, wherein the polypeptide comprises an amino acid sequence that is at least 90% identical to the sequence of SEQ ID NO: 23.

57. The system of claim 55, wherein the polypeptide comprises an amino acid sequence that is at least 95% identical to the sequence of SEQ ID NO: 23.

58. The system of claim 55, wherein the polypeptide comprises the sequence of SEQ ID NO: 23.

59. The system of claim 55, wherein the engineered guide nucleic acid comprises a nucleotide sequence that is at least 85% identical to a sequence selected from: SEQ ID NOS: 624, 628, 630, 634, 638, 641, 643, and 645.

60. The system of claim 55, wherein the engineered guide nucleic acid comprises a nucleotide sequence that is at least 95% identical to a sequence selected from: SEQ ID NOS: SEQ ID NOS: 624, 628, 630, 634, 638, 641, 643, and 645.

61. The system of claim 55, wherein the polypeptide comprises:
a) a mutation that reduces a nuclease activity of the polypeptide relative to the nuclease activity of the polypeptide that is 100% identical to SEQ ID NO: 23, and
b) a fusion partner protein linked to the polypeptide.

62. The system of claim 55, wherein the polypeptide is a nuclease that is capable of cleaving at least one strand of DNA.

63. The system of claim 55, wherein the components further comprise at least one of:
a) a detection reagent; and
b) an amplification reagent.

64. The system of claim 63, wherein:
a) the detection reagent is selected from: a reporter nucleic acid, a detection moiety, and an additional polypeptide, or any combination thereof; and
b) the amplification reagent is selected from: a primer, a polymerase, a dNTP, and an rNTP, or any combination thereof.

65. The system of claim 55, wherein the target nucleic acid comprises a target sequence and the target sequence is adjacent to a protospacer adjacent motif (PAM) selected from the sequence of any one of SEQ ID NOS: 156-159, 325-328, and 369.

66. The system of claim 65, wherein the PAM sequence is the sequence of SEQ ID NO: 369.

67. The system of claim 55, wherein the nucleic acid encoding the polypeptide is an expression vector.

68. The system of claim 67, wherein the expression vector comprises or encodes the engineered guide nucleic acid.

69. The system of claim 67, wherein the expression vector is an adeno-associated viral vector.

70. The system of claim 55, wherein the nucleic acid encoding the polypeptide is a messenger RNA.

71. The system of claim 55, comprising a lipid or lipid nanoparticle.

72. The system of claim 55, wherein the engineered guide nucleic acid comprises a nucleotide sequence that is complementary to a target sequence in a target nucleic acid.

73. The system of claim 65, wherein the engineered guide nucleic acid comprises at least 10 contiguous nucleotides that are complementary to the target sequence and wherein the target sequence is a eukaryotic sequence.

74. The system of claim 55, wherein the polypeptide is fused to at least one nuclear localization signal.

75. The system of claim 55, wherein the polypeptide, or the nucleic acid encoding the polypeptide, and the engineered guide nucleic acid, or the nucleic acid encoding the engineered guide nucleic acid, are a single solution.

76. A composition comprising:
a) a polypeptide, or a nucleic acid encoding the polypeptide, and
b) an engineered guide nucleic acid, or a nucleic acid encoding the engineered guide nucleic acid;
wherein the polypeptide comprises an amino acid sequence that is at least 75% identical to the sequence of SEQ ID NO: 23.

77. The composition of claim 76, wherein the polypeptide comprises an amino acid sequence that is at least 80% identical to the sequence of SEQ ID NO: 23.

78. The composition of claim 76, wherein the engineered guide nucleic acid comprises a sequence that is at least 80% identical to a sequence selected from: SEQ ID NOS: 624, 628, 630, 634, 638, 641, 643, and 645.

79. The composition of claim 76, wherein the engineered guide nucleic acid comprises a sequence that is at least 95% identical to a sequence selected from: SEQ ID NOS: 624, 628, 630, 634, 638, 641, 643, and 645.

80. The composition of claim 76, wherein the polypeptide is fused to at least one nuclear localization signal.

81. The composition of claim 76, wherein the polypeptide is capable of binding to a target nucleic acid but has reduced or no nuclease activity on the target nucleic acid, and wherein the composition further comprises a fusion partner fused to the polypeptide.

82. The composition of claim 76, wherein the polypeptide is a nuclease that is capable of cleaving at least one strand of a target nucleic acid.

83. The composition of claim 76, wherein the target nucleic acid comprises a target sequence and the target sequence is adjacent to a PAM sequence selected from any one of SEQ ID NOs: 156-159, 325-328, and 369.

84. The composition of claim 83, comprising a donor nucleic acid.

The application's sequence listing, which the Patent Office published only in electronic form, follows.

SEQUENCE LISTING (943 sequences)

SEQ ID NO: 1 - protein, 455 aa, Artificial Sequence
  CasM.298706
MAKKGTNRKKMIVKVMKYELKYESGCADFNEMQNELWKLQRQTREVMNRTIQLCYHWSYVQADYCKQHGCARRDVKPCDVYETNATSLDGYIYQLFKDEYPNFLMANLIATLRKAHQKYDALLFDIQEGNSSIPSFKKDQPLIFSKEAIRLPECLSDKRQITLFCFSKPYKSAHPTLDKITFAVRARSASEKSIFDHIISGKYALGESQLVYEKKKWFFLLSYKFTPESVDVNPEKVLGVDLGVVNALCAGSVENPHDSLFIKGTEAIEQIRRLEARKRDLQKQARYPGDGRIGHGTKTRVSPVYQTRDAIARMQDTLNHRWSRALIDFACKKGYGTIQMEDLSGIKALESEKPYLKHWTYFDLQSKIIYKAEEKGIRVVKVNPKCTSRRCSACGYISKENRKNQVEFLCVNCGYHHNADYNAAQNLSIPQIDRLIEKQLKEQESEENEAGANPK

SEQ ID NO: 2 - protein, 410 aa, Artificial Sequence
  CasM.280604
MAKGTLSKVMKYELRYLDGCGDFQNMQKELWTLQRQSREILNRTIQIAYHWDYTDREQFKKTGQHLDIKAETGYKRLDGYIYDSLKEDVQNFASVNVNATIQKAWAKYKSSKIDVLRGDMSLPSYKSDQPLVLHAQSMKIFSSDDDDVLQVTLFSNAYKKACNYSNIRFIIGLHDATQRTIIKKVLSGDWGIGQSQIVYKRPKWFLYLTYNFSPEQHEVNPDKILGVDLGESIAIYASSIGEYGSLRIEGGEISAFAKQLEARKRSLQKQAAYCGKGRIGHGTKSRVSDVYKMEDKIANFRNTVNHRYSKMLIDYALKHMYGTIQMEDLSGIKKETGFPKFLQHWTYYDLQQKIEAKAKEHGINFIKVDPAFTSQRCSKCGNIDSENRPSQAVFCCKKCGYKTNADFNAS

SEQ ID NO: 3 - protein, 426 aa, Artificial Sequence
  CasM.281060
MNVTKVMRYQLIYQGGGGDFESLQNQLWEFQRQTRAILNKTIQTMYLATANQEKFSEKALYHDLCAEYPDMISSTVNATLREATKKYRSSVREILAGRMSLPSYKRDHPILLHNQSVALKQGNQGSYFATISVFSRKYQQGTPGVKQPSFQLIAKDNTQRTILQRLLSGEYKLGQCQLIYIRPKWFLNVAYSFTPSEKALDQEKVLGVDLGCVYAIYASSYGNHGIFKISGDEITSFERKQAAIQNRAFKNDLTRIREIEERRKQKLEQARYCGEGRIGHGVKTRVAPAYQDEGKISRFRETINHRYSKALVDYAEKNGYGTIQMEDLSGIKSSTGFPKRLQHWTYFDLQQKIKYKAEEQGIKVVKIKPAYTSQRCSRCGHIDPANRKSQSEFKCIACGFSSNADYNASQNISMRNIEKIIQGKAN

SEQ ID NO: 4 - protein, 432 aa, Artificial Sequence
  CasM.284933
MAKGTITKVMKYELRYLGGFSDFHEMQKEVWQLQRQYREILNKTIQIALHWDYVSAQQFGESGTYLDIREETGYKTLDGYIYNCLKGAYSEMASANLNAAVQKAWKKYKNSKTQVLQGVMSLPSYKSDQPILIDKGNVKLSAEENNGRAVLTLFSRNYRDTRGLKGNVEFSVLLHDGTQKSIFRNLIDKTYALGQCQLVYERKKWFLLLTYSFTPAGHALDPEKILGVDLGECYALYASSCYAPGILKIEGGEIAEYALRLEKRKRSLQQQARYCGEGRIGHGTKTRVGVVYKAEDRIASFRETINHRYSKELVDYAVSNGYGTIQMEDLSAIQKDLGFPKRLRHWTYYDLQMKITNKAKEHGIAVVKIDPRYTSQRCSKCGHIDPANRPRQEEFCCTACGYACNADYNASQNISIKGIEKIIQKMLSAKAD

SEQ ID NO: 5 - protein, 435 aa, Artificial Sequence
  CasM.287908
MSKGMLTKVMKYTLRYVGGCGDFHEMQSILWELQKQTRAVLNKTIQIAFEWDYRSREAFQETGEYLDVHAETGYKRLDGYIYNCLKNEYADFAGKNLNAAIQTAWKKYNQSKRDIQTGKMSLPSYRSNQPLIIHNDNVMISQDMQAAPSVRFTLLSLEYKKAHDLNTNPTFEVLINDGTQRAIFEKVRSGEYKLGQCMIQYDKKKWFLLLTYSFQPEKLTLDKNKILGVDLGETIVICASSVSERGRFVIDGGEITRFATQIEARKRSQQHQAAYCGEGRIGHGTKTRVDAVYKTEDRIANFRDTINHRYSRALVNYAVKHGFGTIQMEDLSGIKSSDDFPKFLRHWTYYDLQSKIESKAKERGIAVVKVNPRFTSRRCSKCGYIDEGNRKDQAHFCCLSCGFRANADFNASQNLSIKGIDKIIEKEYNANSKQT

SEQ ID NO: 6 - protein, 442 aa, Artificial Sequence
  CasM.288518
MGKPITKTMKYQIHYIDGCGDFHNMQKELWDLQRIVRQILNKTINESYLWFVRSEQYYRDTGENLSVEEQTGYKTLDGHIYNLLKQEYTQKLVSNSLNASIQAAYKKMKDSRRDVMIGTMSLPSYRSDQPIIIYNKNIKFSSHPEHGFVVDCSLFSDAYKKSQGYEKSVKFQVSVDDNTQRSIFENILTGNYKHGQCSIVYEKKKWFLLLTYSFVPEETKLDPDKILGVDVGVVYALYASSKGNHGTFKIKGDEAITFIQRVEARKHSRQLQGTYCGDGRIGHGTKTRVQPVYNERALISNFQDTINHRYSKALIDYAKKNGYGTIQMEDLSGIKEVQQYPKYLQHWTYYDLQLKIQYKAKEAGIGFVKVTPKYTSQRCSHCGNIDEANRPKQDVFRCTVCGYERNADYNASQNLSIKGIDRIIDDQLKQMNKANPKKTENA

SEQ ID NO: 7 - protein, 435 aa, Artificial Sequence
  CasM.293891
MSGGAITKVMKYDLTYKDGYGNFKDMQEAVWKLIRDTRTILNETIKIAYHWDYLNEKSKRETGEHLDLLEETGYKRLDGYIYDDLKDRFPDFASSNLNAAIQTAWKKYKQSQKDVYIGKMTLPSYKSDQPLPINKQSIKIYDEEREHIVELNLFSTKHKKEHGLASNVRFRINLHDNTQHAIYERVLSGEYTLGQCQLLYDRPKWFFILTYSFKPAQNKLDPDKILGVDMGETCALYASTFGEQGSFVINGGEVSEYAKREEARKRSLQKQAAVCGEGRIGHGTKTRVSSVYKEQERISNFRDTINHRYSKALIEYAVKNGCGTIQMEDLSGIRQSTDFPKFLRHWTYYDLQQKIKTKAKETGIAVSMIDPRYTSQRCSRCGHIDKANRKDQAHFHCLKCGYSCNADFNASQNISIRGIDKIIQKELGAKAKQTD

SEQ ID NO: 8 - protein, 431 aa, Artificial Sequence
  CasM.294270
MKEIAKVMKYQLIYLDGGGDFYELQQTLWDLQRQTREILNKTIQSMYLATATNTAFEENALYHRFGAEYPMMAALNVNATLRTAKKRYTSTIKETLRGTMSLPSYKRDQPILLHNQTIHLALEDGQYSALFSVYSEKFQKAHEGVARPRFALMARDGTQRAILDRLLDGSYRLGQSQMTYEQKKWFLSLTYKFVPEVRELDKSKILGVDLGCVYAIYASSMQQKGIFKISGDEITEFEKRQAAMQNREPVSTLERVEQLEQRRWQKQQQARYCGEGRVGHGTGTRVAPAYRDADKIARFRDTINHRYSKALVEYAEKNGFGTIQMEDLSGIKEDTGFPKRLRHWTYFDLQTKIQYKAAERGITVVKIDPQYTSQRCSRCGYIDKANRASQEKFLCQSCGFEANADYNASQNISVEKIDKLIAKDKKKLART

SEQ ID NO: 9 - protein, 436 aa, Artificial Sequence
  CasM.294491
MGQVTKVMRYQLIYQDGGGDFYTVQQELWELQRQTREILNKTIQTMYLADANKEKFDNAAERTLNRRFCVDHPDMYTKTVTATLRKAKAKYNASQKEILAGRMSLPSYKRDQPILLNPQGFKIEEESDSFFAAIAVFSDKYKNKHPDVDVKRLRFRLVVKDGTQRAIIRRVISGEYKLGRSQLLYSKKKWFLNVTYSFEPAEKKVDPDKILGVDLGCVYAIYASSFGSPGVFKISGDEVSSFERKQAAIQNRSPKSTLERVEKIEERHKQKQQQARYCGEGRIGHGTKTRIAPVYQDEDKIARFRDTVNHRYSKALIDYAEKNGYGTIQMEDLSGIKSATGFPKRLKHWTYYDLQTKIEYKAEERGIKVVKIDPRYTSQRCSRCGYIDSGNRKSQAEFCCMACGFSCNADYNASQNISIGGIAKIIADKRKEADAK

SEQ ID NO: 10 - protein, 368 aa, Artificial Sequence
  CasM.295047
YLDIREETGYKTLDGYIYNCLKGAYSEMASANLNAAVQKAWKKYKNSKTQVLQGVMSLPSYKSDQPILIDKGNVKLSAEENNGRAVLTLFSRNYRDTRGLKGNVEFSVLLHDGTQKSIFRNLIDKTYALGQCQLVYERKKWFLLLTYSFTPAGHALDPEKILGVDLGECYALYASSCYAPGILKIEGGEIAEYALRLEKRKRSLQQQARYCGEGRIGHGTKTRVGVVYKAEDRIASFRETINHRYSKELVDYAVSNGYGTIQMEDLSAIQKDLGFPKRLRHWTYYDLQMKITNKAKEHGIAVVKIDPRYTSQRCSKCGHIDPANRPRQEEFCCTACGYACNADYNASQNISIKGIEKIIQKMLSAKAD

SEQ ID NO: 11 - protein, 437 aa, Artificial Sequence
  CasM.299588
MAEKTIVKVMKFELRYIDGAGEFSEMQKHLWELQKQTREVLNKTIQMGYALECKRFAHHDKTGQWLDDKELTGSKYKAVADYINAELKEDYNIFYSDCRNSTVRKAYKKFKDAKNKIFSGEMSLPSYRSNQPIIIHNRNVIIRGNAESALVGLKVFSDGFKALHGFPAAVNFKLCVKDGTQRAIIENVISEIYKISESQLIYDNKKWFLILAYRFTQKKNDLNPDKILGVDLGVKFAVYASSIGEYGSFRIKGGEVTEFIKRLEKRKKSLQNQATVCGDGRIGHGTKTRVADVYKARDKISNFQDTINHRYSRAIVDYARKNGYGTIQLEKLDNSIEKKGDYSPVLVHWTYYDLRTKMEYKAAEYGIKVIAVEPKYTSQRCSKCGYISSENRKTQESFECIKCGYKCNADFNASQNLSVRDIDRIIDEYLGANPELT

SEQ ID NO: 12 - protein, 434 aa, Artificial Sequence
  CasM.277328
VVNVAKGALSKVMKFELSYLDGCGDFQNMQKELWTLQRQTREILNRTIQIAYHWDYTDREHFKKTGQHLDVKSETGYKRLDGYIYDELKETVQNFASVNVNATIQKAWAKYKSSKTDVLRGDMSLPSYKSDQPLVLHAQSIKLSEDKDGPVLQVTLFSNAHKKACDYSNVRFAFRLHDATQRAIFKNVLSGEYGLGQSQIVYKRPKWFLYLTYNFSPEQHGLDPDKILGVDLGESIALYASSLGDYGSLRIEGGEVTAFAKQLEARKRSLQKQAAHCGEGRVGHGTRARVSDVYKAEDKIANFRNTVNHRYSKKLIEYAIQNRYGTIQMEDLSGIKQDTGFPKFLQHWTYYDLQQKIEAKAKENGINFIKVDPSYTSQRCSKCGNIDSDNRPSQAVFCCTKCGFRANADFNASQNLSIPEIDKIIKKERGANTK

SEQ ID NO: 13 - protein, 455 aa, Artificial Sequence
  CasM.297894
MAKKGTNRKKMIVKVMKYELKYEKGCADFNEMQNELWKLQRQTREVMNRTVQLCYHWNYVQADYCKQHGCAHRDVKPCDVYETNATSLDGYIYQLFKDEYPNFLMANLIATLRKAHQKYDALLPDIQEGNSSIPSFKKDQPLIFSKEAIHLPECLSDKRQITLFCFSKPYKSAHPTLDKITFAVRAHSASEKSIFDNIINGKYALGTSQLVYEKKKWFFLLSYKFTPESVDVNPEKVLGVDLGVVNALCAGSVENPHDSLFIKGTEAIEQIRRLEARKRDLQKQARYPGDGRIGHGTKTRVSPVYQTRDAIARMQDTLNHRWSRALIDFACKKGYGTIQMEDLSGIKAMESEKPYLKHWTYFDLQSKIIYKAEEKGIRVVKVNPKCTSRRCSACGYISKENRKNQAEFLCVNCGYHHNADYNAAQNLSIPQIDRLIEKQLKEQESEESEAGANPK

SEQ ID NO: 14 - protein, 500 aa, Artificial Sequence
  CasM.291449
MTERHDNESSKIKAEVSLLNSSVPDFEKKRHVKVLKLHILKPAGDMKWDELGALLRDARYRVFRLANLAISEAYLDFHKWRSGGNEQPKLKISQLNRNLRSMLEDEVTGKQTKMIKSDRYSKSGALPDSIVSPLSMYKLGGLTSKSKWSEVLRGKSSLPTFKLNMAIPVRCDKPGDRRIERTKNGDAEVELRICLQPYPRVIIATGRNSLGDGQRAILDRLLDNTKYSEQGYRQRCFEIKEDQRSGKWHLFVTYDFPAIEPAKNLSRERIVGVDLGAACPLYAAINTGHARLGWKHFSPLAARVRALQNQTIRRRRQILRGGKVSLSEDSARSGHGRKRKLKPISKLEGKIDRAYTTLNHQLSATVIKFAKDNGAGVVQMEDLKGLRETLTGTFLGERWRYEELQRFIRYKADEAGIEIRLVNPQYTSRRCSECGHIHKDFTREFRDKSREGNKSVRFLCPDCGFTADPDYNAARNLASLDIAAIIERQLEIQGLRKHDP

SEQ ID NO: 15 - protein, 471 aa, Artificial Sequence
  CasM.297599
MKEKSKTLVKVARLRILKPAGDMKWSELGEMLRTVRYRVFRLANLAVSEAYLGFHMYRTNRATEFKAETIGKLSRRLREMLIEEGVDEKDLSRYSQTGAVPDTVAGALGQYKIRGITSPTKWRQVVRGQAALPTFRNDMAIPIRCDKQYQRRLEKTEAGEIEVELMICRKPYPRIVLGTADLGPGQRAILERLLQNTDNSADGYRQRLFEAKQDTQTKKWWLYVTYDFPRLKEGKLNQEIVVGVDLGFSIPLYVALNIGHARLGRRHFQALGNRIRSLQRQVLARRRSIQRGGRVNISHSTARSGHGRKRKLLPTEKLRGRIEKSYSTLNHQLSASVIDFAKNHHAGTIQIEDLANLKEELAGTFIGARWRYHQLQQFLKYKAEEAGITLNQVNPRYTSRRCSECGFINIDFDRAFRDAGRTEGRVTKFLCPECGYEADPDYNAARNISILDIDKLIRVQCKKQGLTYDAH

SEQ ID NO: 16 - protein, 475 aa, Artificial Sequence
  CasM.286588
MPERPKTVNKVIWFQIHKPAGDMTWKELGNLLREARYRVFRLANLAVSEKYLSFHMWRTGQEYKSETIGKLNRRLREMLIEEGVEEESQKRFSATGALPDTVVSTLAKGKLAAITSKSKWKDVVNGKTSLPTFKLNMAIPVRCDKAEQRRLRRTESGDVELELMICKQPYPRVVLKTGKLKSGQRAILDRLVENNDNSKEGYSQRVFEIKQVENNDGSKEWRLYISYTFPKKAVEANADVAVGVDIGFSVPLVAAVNNGLERLGYNDFRALNERIRSLQRQVLVRRRSMQSGGRDYVSTPTARSGHGRKRKLLPIQTLRKRWDNAYTTLNHQLSHAVVSFAENHGAATIQIENVKSLKDELRGTFLGQRWRYFELQQFLKYKADEVGIELREVNARYTSRRCSECGYINMAFTRQARDKGRVDGKPMEFVCPECGYKAHPDYNAARNIAMLDIEQKMQVQCKQQGITYADDSEVL

SEQ ID NO: 17 - protein, 448 aa, Artificial Sequence
  CasM.286910
MTWPELGNMLRTVRYRVFRLANLAVSEAYLGFHMFRTKRAEEFKAETMGKLSRRLREMLIEEGVDEKDLSRYSQTGAVPDTVAGALSQYKIRGITSPTKWRQIVRGQVALPTFRNTMSIPVRCDKLYQRRLEQGDSGEVEVELMICRNPYPRVVLGTGDLNPGQQAILERLLQNTDNSADGYRQRLFEIKEDVQTRKWWLYVTYDFPKTTGKLNPEIVVGVDLGFSIPLYVALNSGHARLGYLHFKALGERIKSLQKQVMARRRAIQRGGRVSISHSTARTGHGVKRKLQPTEKLRGRIEKSYSTLNHQLSASVIDFAKNHHAGVIQIEDLSGLKEQLTGTFIGARWRYHQLQQFLKYKAEEAGITLKQINPRYTSRRCSECGFINMDFDRAFRDAGRTYGKVTKFLCPECGYEADPDYNAARNIATLDIEKLIRVQCEKHGLKFDAH

SEQ ID NO: 18 - protein, 477 aa, Artificial Sequence
  CasM.292335
VGKEGKRNVKVMKIRILKPCDGMTWNELGQLLRDARYRVFRLANLTVSEAYLNFHLWRTGRSQEFKKQTIGQLNRQLRNILQQEKYDDEKLNRYSKTGALPDTVCSALWQYKLMAVMKKSKWSEVIRGKSSLPTFRNDMAIPVRCDKPEQKRIEKTEQGQVEAALQVCVQPYPRVILGTHTLGDGQDAILKRLLDNQNQAIGGYRQRSFEIKYDEQKRWWLFITYDFPATEVATDKTIAVGVDLGVSVPLYAAVNNGPARLGRREFGGLGRRIRDLRNQTDARRRSIQRSGREGQSDDTARAGHGRKRKLLPIHILEGRLDKAYTTLNHQMSAAVIKFAAEQGAGIIQIENLAGLQDELRGTFIGGRWRYRQLQDFLKYKTQEMGIELRQVNPKYTSRRCSKCGFIHKDFDRDYRNRHSENGKPAQFVCPNPDCKYESDPDYNAARNLATLDIEEQIRVQCQKQGLEYDSKKDKNAL

SEQ ID NO: 19 - protein, 472 aa, Artificial Sequence
  CasM.293576
MKEKSKTLVKVARLRILKPAGDMTWSELGEMLRTVRYRVFRLANLAVSEAYLGFHMFRTQRAAEFKAETMGKLSRRLREMLIEEGVDEKELNCYSLTGAVPDTVAGALHQYKIRGITSPTKWRQVVRGQAALPTFRNDMSIPIRCDKPYQRRLEKTEAGEVEVELMICRKPYPRIVLGTADVGPGQEVILERLLQNKDNSSDGYRQRLFEAKQDRQTGKWWLYVTYDFPRPEEGELNPEIVVGVDLGFSVPLYVAINNGYARLGRRHFQALGNRIRSLQRQVLARRRSIQRGGRVNISHDTARSGHGIKRKLLPTEKLRGRIEKSYSTLNHQLSASVIDFTKNHHAGTIQIEDLANLKEVLAGTFIGARWRYHQLQQFLKYKADEAGITLKEVNPRYTSRRCSECGFIHKDFDRAFRDSGRTDGKVARFVCPECGYGPVDPDYNAAKNISTLDIEKHIRVQCKKQGLEYEVH

SEQ ID NO: 20 - protein, 470 aa, Artificial Sequence
  CasM.294537
MKEKAKTLVKVARLRILKPAGDMTWPELGNMLRTVRYRVFRLANLAVSEAYLGFHMFRTKRAEEFKAETMGKLSRRLREMLIEEGVDEKDLSRYSQTGAVPDTVAGALSQYKIRGITSPTKWRQIVRGQVALPTFRNTMSIPVRCDKLYQRRLEQGDSGEVEVELMICRNPYPRVVLGTGDLNPGQQAILERLLQNTDNSADGYRQRLFEIKEDVQTRKWWLYVTYDFPKTTGKLNPEIVVGVDLGFSIPLYVALNSGHARLGYLHFKALGERIKSLQKQVMARRRAIQRGGRVSISHSTARTGHGVKRKLQPTEKLRGRIEKSYSTLNHQLSASVIDFAKNHHAGVIQIEDLSGLKEQLTGTFIGARWRYHQLQQFLKYKAEEAGITLKQINPRYTSRRCSECGFINMDFDRAFRDAGRTYGKVTKFLCPECGYEADPDYNAARNIATLDIEKLIRVQCEKHGLKFDAH

SEQ ID NO: 21 - protein, 468 aa, Artificial Sequence
  CasM.298538
MAKKAKTMFKVTNFRILKPAGDMTWKELGQLLRDARYRTFRMANLALSEAYLNFYLLKKGDLKEYKNVKIGQIAKRLRDMLIEEGVDEEVQNRFSPKVALPAYVYSALDQFKLRGLTSKSNWKKVLRGQASLPTFRLNMSVPIRCDKPEHRRLEKTENGNVEVDLMICRKPYPRVVLETLKLDGSSKAILDRLLENEDNSPGNYRQRCFEVKQNPRSNDWWLYVTYEMPVDKDKKLDPKVIVGVDLGFSVPLYVAINNGHARLGRRHFQALGKRIHNLQNQVLARRRSIQRGGQVNLSHSTSRSGHGRKRKLQPTEKLQQKINSAYSTLNHQLSSSVIDFANNHKAGTIQIEDLETLKEQLTGTYIGRQWRYYQLQQFIEYKAKENSITVKKINPKYTSRRCSMCGHIHADFDRTFRDRSSNKGFVTKFICPECNFEADPDYNAAKNISTLDIENKIKLQCKKQKIDY

SEQ ID NO: 22 - protein, 457 aa, Artificial Sequence
  CasM.19924
MPKITRKIELLFDRSGLSEEECKEKWRFIYQINDNLYRVANRLVNQLYLADEIDDILRLSDQEYIALRKKLANKKLDEATRISLEEQMSQVMKRVNERRSAILQRPQQSFAYSVVTDSDTEGLTAKILDVLKQDVLSHYKADTKEVLKGEKSISNYKKGMPIPFAFNDSLRLYKEDGFFYLKWYNGIRFLLNFGRDASNNQLIVERCLGISKDEISYKACSSSIQIKKKGNHSKIFLLLVVDVPVEQYAQKPNMVVGVDLGLNVPIYAASNSTLERKAIGSREAFLNQRGAFQRRFRALQRLQTTKGGRGRLHKLEPLERVREAERNWVRTQNHLFSREVINFAIDVGASTIQMEKLANFGRDAQGEVREDKKYVLRNWSYFELQNLIEYKAKRAGIKVKYINPAFTSQTCSECGQLGERDSIHFKCTNPDCPNCGKDIHADYNGARNIAKSKDYIK

SEQ ID NO: 23 - protein, 468 aa, Artificial Sequence
  CasM.19952
MPTITRKIELTLLTEGLSEEQRKEQWGLLYHINDNLYKAANNISSKLYLDDHVSSMVRMKHAEYLSLLKELARAEKQKTPDADAIAELRKKVAAAEKEMTDQEHAICKYATEMSTQSLSYRFATELETNIFAKILDCLKQGVFATFNSDARDVKRGERAIRNYKKGMPIPFAWDKSLRIEKDNKDFYLRWYNGLRFLFNFGKDRSNNRLIVERCLKMDADYDGEYKLCNSSIQIAKREGKTKLFLLLVVKIPQEHVELNKKVVVGVDLGINVPAYVATNITEERKAIGDREHFLNSRMAFQRRYKSLQRLRGTAGGKGRAKKLEPLERLRKAEHNWVHTQNHLFSREVVDFAVKSHAATIHMEDLSGFGKDNDGNADERKEFVLRNWSYYELQNMIAYKAAKYGIKVEKIHPAYTSKTCSWCGQLGFREGVTFICENPECKQCGEKVHADYNAARNIANSKDIIKKNE

SEQ ID NO: 24 - protein, 468 aa, Artificial Sequence
  CasM.274559
MPTITRKIELTLCTDGLSEEQRKEQWGLLYHINDNLYKAANNISSKLYLDDHVSSMVRMKHAEYLSLLKELARAEKQKTPDADAIAELKKKVAATEKEMTDQEHAICKYATEMSTQSLSYRFSTEFETKIFAKILDCLKQGVFATFNSDAKDVKRGERAIRNYKKGMPIPFAWTDSLRIKKDNKDFYLLWYNGLRFLFNFGKDRSNNRLIVERCLKMDADYDGEYKLCNSSIQIAKREGKVKLFLLLVVSIPKEHVELNKKVVVSVDLGINVPAYVATNITEERKAIGDREHFLNSRMAFQRRYKSLQRLKGTTGGKGRTKKLEPLERLRKAEHNWVHTQNHLFSREVVDFAVKTHAATIHMEDLSGFGKDNDGNADERKEFVLRNWSYYELQNMISYKAAKYGIKVEKIRPAYTSKTCSWCGQHGFREGVTFICENPACKQCGEKVHADYNAARNIANSKEIIKKNE

SEQ ID NO: 25 - protein, 469 aa, Artificial Sequence
  CasM.286251
MPTITRKIELTLCTEGLSDQERKDQWNLLYHINDNLYRAANNISSKLYLDDHVGSMVRLKHAEYLSLLRALEKAKKQKAPDEEVIAELSQQVATAEQEMDEQAKAICQYATEMSTQTLSYRFATELETNIFGQILTCLRQGVFSTFNSDARDVKRGERSIRTYKKGMPIPFPWNDSLRIGFEDGEFYLRWYNGLRFRFDFGKDRSNNCLIVQRCMKMDKDYEGDYKLCNSSIQMVKREGKPKFFLLLVVNIPQERVELNKNIVVGVDLGINAPAYVATNTTPERKQIGDREHFLNERMAFQRRFKSLQRLKGTTGGRGRAKKLEPLERLRKAEQNWVHTQNHLFSREVIDFAVKARAATIHMEDLSGFGKDNDGNADERKEFVLRNWSYYELQNMITYKAAKYGIKVEKIRPAYTSKTCSWCGHQGFREGITFICENPECKKFGEKEHADYNAARNIANSKEIIKNNEE

SEQ ID NO: 26 - protein, 468 aa, Artificial Sequence
  CasM.288480
MPTITRKIELTLLTEGLSEEQRKEQWGLLYHINDNLYKAANNISSKLYLDDHVSTMVRMKHAEYLSLLRELARAEKQKKPDVDAIAELREKVTAAEKEMSDQERAICTYATEMSTQSLSYRFATEIETNIFAKILDCLKQGVFATFNSDARDVKRGERAIRNYKKGMPIPFAWDKSLRIEKDNKDFYLRWYNGLRFLFNFGKDRSNNRLIVERCLKMDADYDGEYKLCNSSIQIVKREGKVKLFLLLVVSIPQEHVELNKKIVVGVDLGINVPAYVATNITEERKAIGDREHFLNSRMAFQRRYKSLQRLKGTAGGKGRTKKLEPLERLRKAEHNWVHTQNHLFSREVVDFAVKSHAATIHMEDLSGFGKDNDGNADERKEFVLRNWSYYELQNMIAYKAAKYGIKVERIRPAYTSKTCSWCGQLGFREGVTFICENPECKQCGEKVHADYNAARNIANSKDIIKKNE

SEQ ID NO: 27 - protein, 463 aa, Artificial Sequence
  CasM.288668
MPTMTRKIELKLCTEGLSDEERKAQLGLLYHINDNLYKAANNISSKLYLDDHVSSMVRLKHAEYLSLLNEFEKAKKKGDEEQIVELSLRVAAAEKELTDQELAICKYATEMSTDTLAYRFANEIEINVFGQILACLKQGIHSTFKKDAADVKRGERAIRNFKKGMPIPFPWSKSIRIENEGSDFYLRWYNGLRFRFDFGKDRSNNRLIVSRCLNLDPDFEDEYKLSNSSLQMVKRDGRPKLFLLLVVNIPQENVELNKKIVVGVDLGINSPAYVATNITMERQRIGSRDTFLNARMAIQRRFQSLQKLQNTAGGRGRKKKLEPLERLKETERNWVRTQNHLFSRDVVQFAVKTRAATIHMEDLSGFGKDDDGNADEKKEFVLRNWSYYELQTMIKYKAAKYGIKVEKIRPAYTSRTCSWCGHEGDRKGETFICENPECEKYGKKENADYNAARNIANSTDIIK

SEQ ID NO: 28 - protein, 468 aa, Artificial Sequence
  CasM.289206
MPTITRKIELTLCTEGLSDEQRKEQWGLLYHINDNLYKAANNISSKLYLDEHVSSMVRMKHAEYLSLLKELARAEKQQTPDEGLIAELSRKLSAAEKEMADQELAICKYATEMSTQTLSYNFAKEIETNIFGQILTCLRQGVYATFNSDAKDVKRGERAIRNYKKGMPIPFPWNNSLKIESDSGEFYLRWYNGLRFLLTFGKDRSNNRMIVNRCMKMDEDFEGEYKLCNSSIQLAKRDGKPKLFLLLVVNIPQEHVKLNKKIVVGVDLGVNVPAYVATNITEERKAIGDREHFLNTRMAFQRRYKSLQRLKGTAGGKGRTKKLEPLERLRDAERNWVHTQNHLFSREVVNFAVQARAATIHMEDLSGFGKDKDGNADEKKEFVLRNWSFYELQNMIAYKSAKYGIKVVKIRPAYTSKTCSWCGQQGDRKSTTFICENPKCKHYGESIHADYNAARNIANSNDIVKENE

SEQ ID NO: 29 - protein, 467 aa, Artificial Sequence
  CasM.290598
MPKITRKIEMTLCTEGLSDEQRKEQWGLLYHINDNLYKAANNISTKLYLDEHVSSMVRMKHADYLSLLKELAKAEKKSPDEDLIAELREKLAAAEQEMTDQELAICKYATEMSTQTLAYKFATEIEINVFGQILACLKQAAQSNFKSDAKDVKRGERAIRNYKKGMPIPFPWNDNIRIDADGDEFYLRWYNGLRFHLTFGKDKSNNRMIVKRCLKMDKDFEGEYKLCNSSIQMVKRDGKPKLFLLLVVNIPQEHVELNKNVVVGVDLGVNVPAYVATNITEERKAIGEREHFLNTRMQIQRRYKSLQRLKATAGGKGRTKKLEPLERLRKAEHNWVHTQNHLFSREVVNFAVQTHAATIHMEDLSGFGKDDDGNADEQKEFVLRNWSFYELQNMIAYKAAKYGIKVEKVKPAYTSKTCSWCGQLGFRQGVTFICENPACKQCGEKVHADYNAARNIANSKDIIKKNE

SEQ ID NO: 30 - protein, 469 aa, Artificial Sequence
  CasM.290816
MPTITRKIELHLCTDGLTDEQQKAQRLLLYHINDNLYKAANNVSSKLYLDEHVSSMVRLKHDEYLSLSRELARAEKKHDDELTTELRGKLAAAEREMTDQELAICKYATEMSTQSLSYRLVTELETKIFAKILDCLKQGVYATFNSDARDVKRGERAIRNYKKGMPIPFAWNDSVRIEYDEKEKDFYLRWYNDIRFKFHFGRDRSNNRLIVSRCLKLDKDYEGDYQLCNSSIQIVKRDGSTKFFLLLVVKIPQEHVELNKRIVVGVDLGINYPAYVATNCTEERMYIGDREHFLNTRMQFQRRYKSLQKLKGTAGGKGRSKKLEPLERLRNAERNWVHTQNHLFSLKVVNFAVQTHAATIHLEDLSGFGKDDDGNADERKEFVLRNWSYYELQSMIEYKAKKYGIKVEKIRPAYTSQTCSWCGQRGFRQGVTFICENPECKKCGEKENADYNAARNIANSKDVIKDKNE

SEQ ID NO: 31 - protein, 491 aa, Artificial Sequence
  CasM.295071
TPFVLYFQNYSLSLRQHITLYSMPTITRKIELTLCTEGLSDQERKDQWNLLYHINDNLYRAANNISSKLYLDDHVGSMVRLKHAEYLSLLRAMEKAKKQKAPDEEVIAELSQQVAAAEQEMDEQAKAICQYATEMSTQTLSYRFATELETNIFGQILTCLRQGVFSTFNSDARDVKRGERSIRTYKKGMPIPFPWNDSLRIGFEDGEFYLRWYNGLRFRFDFGKDRSNNRLIVQRCMKMDKDYEGDYKLCNSSIQMVKREGKPKFFLLLVVNIPQERVELNKNIVVGVDLGINAPAYVATNTTPERKQIGDREHFLNERMAFQRRFKSLQRLKGTTGGRGRAKKLEPLERLRKAEQNWVHTQNHLFSREVIDFAVKARAATIHMEDLSGFGKDRDGNADERKEFVLRNWSYYELQNMITYKAAKYGIKVEKIRPAYTSKTCSWCGHQGFREGITFICENPECKKFGEKEHADYNAARNIANSKEIIKNNEE

SEQ ID NO: 32 - protein, 469 aa, Artificial Sequence
  CasM.295231
MPTITRKIELHLCTEELSDEQQKAQRLLLYHINDNLYKAANNVSSKLYLDEHVSSMVRLKHDEYLSLLRELARAEKKADDELATQLREKLVAAEREMTDQELAICKYATEMSTQSLSYRFVTELETKIFAKILDCLKQGVYATFNSDSRDVKRGERAIRNYKKGMPIPFAWDKSVRIEYEEKEKDFFLRWYNDIRFKFHFGRDRSNNRLIVSRCMKLDKDYEGDYQLCNSSIQIVKRDGSTKYFLLLVVKIPQEHVELNKKIVVGVDLGINYPAFAATNCTEERMSIGDREHFLNTRMQFQRRFKSLQRLKGTTGGKGRNKKLEPLERLRKAEHNWVHTQNHLFSLKVVNFAVQAHAATIHLEDLSGFGKDDDGNADERKEFVLRNWSYYELQNMIKYKAKKFGIQVEKIRPAYTSQTCSWCGQRGFRQGITFICENPECKKCGEKENADYNAARNIANSKDIIKDKDE

SEQ ID NO: 33 - protein, 460 aa, Artificial Sequence
  CasM.292139
MPIITRKIELHISKEGLSAEDYKAQWQYLRQINDNLYMAANRVSSHCFLNDEYKYRLCLQIPDYIDIEKQLKDSKRARLSKEELGQLKKRKKELENTVKGRFQDEFEKNSLYTIISNEFGEIIPGQILTCLRQCVQSKYNRAKEELEKGERAISTYKKGMPIPFPINKSIRLQKQGEDFVLKWYNKIVFKLHFGRDRSNNRVIVERLIQSALNDKQKGEDYVMNNSSIQLVEKDKMTKIFLLLSMDIPTQKRKLDSELVLGVDLGLNFPLYYATNQSANIHDHIGDKDIFLKERMVFQRRFKELQRLQCTQGGRGRKKKLEPLEKLRDKERNWVRTKNHIFSREVIKVALHLGAGTIHLENLHNFGKDGNGELKNSKKFVFRNWSYFELQSMIEYKAKMEGITVKYVNPAYTSQTCSVCGMIGERKEQAVFRCMNSSCLEYGKEVNADFNAARNIAKAKM

SEQ ID NO: 34 - protein, 466 aa, Artificial Sequence
  CasM.279423
MPTITRKIELTLCTDGLSDDLRKDQWQLLYHINDNLYKAANNISSKLYLDEHVASMVRLKHAEYLGLIKELAKARKRADDEAVRDLCSKLAVAEQEMNEQAKAICDYATEMSTQTLSYNFAKEIETNIFGQILTCLRQGVLLNFNSDARDVKRGERAIRNYKKGMPIPFPWNDTIKIVSEGDEFYLRWFSGLRFHLNFGKDRSNNRMIVRRCLKMEQDFDEEYKISNSSIQVAKRDGKQKLFLLLVVQIPQEQVVLNKKIVVGVDLGVNVPAYVATNITEERKAIGDREHFLNTRMQFQRRYKSLQRLKTTEGGRGRAKKLEPLERLRKAEHNWVHTQNHLFSREVVNFALQTQAATINMEDLSGFGKDNDGNADECKEFVLRNWSYYELQNMIVYKASKYGIRVQKIRPAYTSKTCSWCGHMGFREGVTFICENPDCKQFGEKVHADYNAARNIANSKEIIKNDE

SEQ ID NO: 35 - protein, 444 aa, Artificial Sequence
  CasM.20054
MSKTVTKTVKIALICEHTNKYGEKVDYKDINKLLWKLQKQTRELKNKTIQLCWEYNNFSCDYYKEHHEYPNMEDILKYKRINGFVENKLKTVNDLYSSNCSTTILSTCNEFQNYRSEFLKGTRSINSYKSDQPLDLHKGAIKLEHDGKDFYVSLKLLKRSAFNAMEFKGSDIRFKLNVKDKDKSTLKILESCYDKIYSISASKMTYDRKAGKWFLLLAYSFTPAKTENLDPEKILGVDLGIKIPICASVYGDLDRLTIEGGKIEEFRRRVEARKRSLQKQGKQCGDGRIGHGTKKRIKPITDIGDKIARFRDTENHIYSRYLIEYAVKKGCGTIQMEKLEGITREKDIFLKNWTYFDLQKKIEYKAKEKGIKVVYIEPAYTSKRCSSCGFIDTDNRLDQAHFKCLKCGFNENADYNASQNIGIKNIDKIIKEEHKSASDKLTSE

SEQ ID NO: 36 - protein, 439 aa, Artificial Sequence
  CasM.282673
VIILTKVVKLYLISEQINKEGQKIDYQRINSILWDLQKQTRDIKNRTVQLCWEWMNFSSDYCKTQEEYPKERDILGYTLEGYVYDYFKTGYDLYTGNISTSSREVCSSFKNVKKEILKGERSILSYKANQPLDLHKKAISLEYDNFNFFVKLKLLNRTGKKKYDITEDINFKIQVNDKSTRTILERCYDKEYKISGSKLIYEKKKKLWRLNLCYSFENSQVETLEKDKILGIDLGIVYPLMASIYGEYDRFSIKGGEIEEFRRRTEARKRSILQQTKYCGDGRIGHGRNKRTQPAYKINDKIARFRDTANHKYSRALIEYAVKKNCGIIQMENLTGISDNTDCFLKDWSYYDLQTKIENKAKEMGIKVVYIKAQYTSQRCSRCGYIDVNNRIRQALFKCQNCGYETNADYNASQNIGMYDIENIIEETLKIQSANVKQS

SEQ ID NO: 37 - protein, 437 aa, Artificial Sequence
  CasM.282952
MTKVTKVYLISEQIDKDGNKIDFKKISELLWNLQMQTRDIKNKCVQLCWEWLNFSSDYYKKSEEYPKEKDTLGYTLSGFVYDRIKNGSDLYSSNLSTSSRDTCTAFSNYKKEMLKGERSVLSFKANQPLDIHNKAIKLSYENGNFFVALKMLNRAGKEKYGIKDDLRFRMQVRDKSVRTILERLMNDEYKVSASKLMYDKKKKLWKLNLCYSFDNHVISTLDTEKIMGVDLGVVYPIMASVNGDYARFSIKGGEIEAFRSRVEARRRSLLNQSRYCGDGRIGHGRKKRTEPATQIADKIARFRDTTNHKYSRALIDYAIKNGCGTIQMEKLTGITSSAEHFLKEWSYFDLQTKIESKAKEAGIKVVYINPKFTSQRCNKCGYIHTDNRPVQARFCCQKCGYEENADYNASQNIGTKHIDVIIEETLKMQCEPETPTE

SEQ ID NO: 38 - protein, 428 aa, Artificial Sequence
  CasM.283262
MNKVVKLALICEQSDKDNSPVDYKKINEILWELQKQTREIKNKAIQYCWEYNNFSSDYYKKFNEYPKEKDILSYTLVGFVNDKFKTGNDLYSGNCSTTVRNACTEFKNSKKELIKGSRSIINYRSNQPLDIHNKCIRIEFENNCFYTYLKLLNRPAFKKYNFANTEIKFKILVRDNSTKTILERCISNEYEIAASKLLYDQKKKCWFLNLVYAFEIKSNNSLDPNKILGVDLGIHYPICASVYGSLDRFTIDGGEIDEFRRRVESRKISMLKQGKNCGDGRIGHGIKARNKPVYNIEDKIARFRDTANHKYSRALIEYAVKHTCGTIQMEDLTGITDIANRFLKNWSYYDLQTKIEYKAKEAGINIVYIDPKNTSRRCSKCGYIDKENRETQSRFICLKCGFKENADYNASQNIGIKDIDKLIKEDVH

SEQ ID NO: 39 - protein, 443 aa, Artificial Sequence
  CasM.284833
VTLLVKVVKIYLISEQFDKAGNQIDYKEVNKILWELQKQTREAKNKTVQLLWEWNNFSSDYVKASGIYPKAKDIFGYSSVHGQANKELRTKLALNSSNLSTTTMDVCKIFNTYKKEVWEGKRSVPSYKSDQPLDLHKESIKLIYENNEFYVRLALLKKAEFAKYGFKDGFRFKMQVKDNSTKTILERCFDEVYKINASKLLYDQKKKKWKLNLSYSFDNKNISELDKEKILGVDVGVNCPLVASVFGDRDRFIIKGGEIEKFRKSVEARRRSMLEQTKYCGDGRIGHGRKKRTEPALNIGDKIARFRDTTNHKYSRALIEYAVKKGCGTIQMEKLTGITSKSDRFLKDWTYYDLQTKIENKAKEVGINVVYIAPKYTSQRCSKCGYIHKDNRPNQAKFRCLECDFESNADYNASQNIGIKNIDKIIEKDLQKQESEVQVNENK

SEQ ID NO: 40 - protein, 428 aa, Artificial Sequence
  CasM.287700
MNKVVKLALICEQSDKNNSPVDYKKVNEILWELQKQTREIKNKTIQYCWEYYNFSSDYYKKFNKYPKEKDILSYTLWGFINDKFKTGNDLYSGNCSATTKKVIKEFKNSKKELIRGSRSIINYKSNQPLNIHNKCIHLQFKNNNFYVSINLLNRRSFKKYNFANTAIKFKILVRDNSTKAILERCISNEYKISESQLIYNKKKKCWFLNLSYAFEIKSNNSLDPNKILGVDLGIHYPICASVYGSLDRFTIDGGEIDEFRRRVESRKISMLKQGKNCGDGRIGHGIKARNKPVYNIEDKIARFRDTANHKYSRALIEYAVKNNCGTIQMEDLTGITDNANRFLKNWSYYDLQTKIEYKAKEASINVVYINPENTSRRCSKCGYIDKENRKTQSSFICLKCGFKENADYNASQNISIKDIDKLIKEDVH

SEQ ID NO: 41 - protein, 443 aa, Artificial Sequence
  CasM.291507
VTLLVKVVKIHLISEQFDKAGNRIDYEEVNKILWELQKQTREAKNKTVQLLWEWNNFSSDYVKASGIYPKAKDIFGYSSVHGQANKELRTKLALNSSNLSTTTMDVCKNFNTYKKEVWKGKRSVPSYKSDQPLDLHKDSIKLIYENNQFYVRLALLKKAEFAKYGFKDGFHFKMQVKDNSTKTILERCFDEVYKINASKLLYDQKKKKWKLNLSYSFDNKNISELDKEKILGVDVGVSYPLVASVFGDRDRFKIKGGEIEKFRKSVEARRRSMLEQTKYCGDGRIGHGRKKRTEPALNIGDKIARFRDTTNHKYSRALIEYAVKKGCGTIQMEKLTGITSKADRFLKDWTYYDLQTKIENKAKEVGINVVYIAPKYTSQRCSKCGYIHKDNRPNQAKFRCLECDFESNADYNASQNIGIKNIDKIIEKDLQKQESEVQVNENK

SEQ ID NO: 42 - protein, 449 aa, Artificial Sequence
  CasM.293410
LIWKDALGGIILTKIVKLYLISEQIDKDGNRVDYKEINSILWNLQKQTRDIKNKTVQLCWEWMNFSSDYYKKNELYPNEKEILNLTLRGYAYDHFKQGYDLYSSNISVLTEAVCGAFKNAKKEMLNGEKSVLSYKAEQPLDIHKKCIKLEYDKNFYVKLKMLNKAGKKKYGIEDDLNFKIQVEDKSTRTILERCIDGEYVVSGSKLIYDKKKKLWKLNLCYSFKANEIESLDKNKILGIDLGIACPLMASVNGEFDRFSIKGGEIETFRKRIEARKRSVLHQTKYCGDGRIGHGRNKRTEPAYKINDKIARFRDTANHKYSRALIDYAIRKNCGMIQMENLTGISDKKEHFLKEWSYYDLQTKIENKAKEKGIKIVYINPEYTSQRCSKCGYIDANNRELRAVFKCQKCGFEADADYNASQNIGIKNIEDIIENTLKISSANEKQTKNT

SEQ ID NO: 43 - protein, 462 aa, Artificial Sequence
  CasM.295105
VFYSTFLCYILTKYIDFSANECYNINTSSEVKQLMNKVVKLALICEQSDKDNSPVDYKKINEILWELQKQTREIKNKAIQYCWEYNNFSSDYYKKFNEYPKEKDILSYTLVGFVNDKFKTGNDLYSGNCSTTVRNACTEFKNSKKELIKGSRSIINYRSNQPLDIHNKCIRIEFENNCFYTYLKLLNRPAFKKYNFANTEIKFKILVRDNSTKTILERCISNEYEIAASKLLYDQKKKCWFLNLVYAFEIKSNNSLDPNKILGVDLGIHYPICASVYGSLDRFTIDGGEIDEFRRRVESRKISMLKQGKNCGDGRIGHGIKARNKPVYNIEDKIARFRDTANHKYSRALIEYAVKHTCGTIQMEDLTGITDIANRFLKNWSYYDLQTKIEYKAKEAGINIVYIDPKNTSRRCSKCGYIDKENRETQSRFICLKCGFKENADYNASQNIGIKDIDKLIKEDVH

SEQ ID NO: 44 - protein, 430 aa, Artificial Sequence
  CasM.295187
LISEQIDKDGNRVDYKEINSILWNLQKQTRDIKNKTVQLCWEWMNFSSDYYKKNELYPNEKEILNLTLRGYAYDHFKQGYDLYSSNISVLTEAVCGAFKNAKKEMLNGEKSVLSYKAEQPLDIHKKCIKLEYDKNFYVKLKMLNKAGKKKYGIEDDLNFKIQVEDKSTRTILERCIDGEYVVSGSKLIYDKKKKLWKLNLCYSFKANEIESLDKNKILGIDLGIACPLMASVNGEFDRFSIKGGEIETFRKRIEARKRSVLHQTKYCGDGRIGHGRNKRTEPAYKINDKIARFRDTANHKYSRALIDYAIRKNCGMIQMENLTGISDNKEHFLKEWSYYDLQTKIENKAKEKGIKIVYINPEYTSQRCSKCGYIDANNRELRAVFKCQNCGFEADADYNASQNIGIKNIEDIIENTLKISSANEKQTKNT

SEQ ID NO: 45 - protein, 429 aa, Artificial Sequence
  CasM.295929
LVKVVKIYLISEQVDEQGKDVDYNTICGVLWDLQWETREIKNKTVQLCWEWSGFSSDYYKKYGEYPKEKNLLDYTMGGFVYDKLKSKYHLYTANLSTTSQNTCGIFRTYKVDFVKGNRSVLSFKADQPLDVHKKSISIDRIDDNYFVKLKLLNKSGIQKYGIRDDFHFRMLVKDNSTKTILERCVGGDYKAAASKIIYDKKKKMWCLNLSYEFDVNTAKDLNKNRILGIDIGIVYPVVASVNGELDRFVIQGGEIETFRRRVENRKKSLLKQTKYCGDGRIGHGRNKRTEPVDIISDQIARFRNTANHKYSRAVIDYAVRKQCGTIQMENLKGITDKSDRFLKNWSYYDLQQKIEYKAKEKGINVVFINPKYTSQRCSRCGYIDSANRPKLPNQSKFLCIKCGFTENADYNASQNIALYNIEKLIDAEA

SEQ ID NO: 46 - RNA, 53 nt, Artificial Sequence
  CasM.298706 guide nucleic acid
cguugcagcucgcacguuggcacugguugaagguauuaaauacucguauugcu

SEQ ID NO: 47 - RNA, 52 nt, Artificial Sequence
  CasM.280604 guide nucleic acid
guugcaacucacgcgcguauguggcuugaagguauuaaauacucguauugcu

SEQ ID NO: 48 - RNA, 52 nt, Artificial Sequence
  CasM.281060 guide nucleic acid
guugcaauucauaucuccggguggauugaagguauuaaauacucguauugcu

SEQ ID NO: 49 - RNA, 52 nt, Artificial Sequence
  CasM.284933 guide nucleic acid
guugcagcgugcgcgagcguguggcuugaagguauuaaauacucguauugcu

SEQ ID NO: 50 - RNA, 52 nt, Artificial Sequence
  CasM.287908 guide nucleic acid
guugcaacucgcacgugaaugcgacuugaagguauuaaauacucguauugcu

SEQ ID NO: 51 - RNA, 52 nt, Artificial Sequence
  CasM.288518 guide nucleic acid
gaugcaacucguguguaugugcgaguugaagguauuaaauacucguauugcu

SEQ ID NO: 52 - RNA, 52 nt, Artificial Sequence
  CasM.293891 guide nucleic acid
gacgcaacucgcgcgcgggcauguauugaggguauuaaauacucguauugcu

SEQ ID NO: 53 - RNA, 52 nt, Artificial Sequence
  CasM.294270 guide nucleic acid
gaugcaucugacacagcugggugaguugaagguauuaaauacucguauugcu

SEQ ID NO: 54 - RNA, 52 nt, Artificial Sequence
  CasM.294491 guide nucleic acid
guugcaacacauguaugugggugaguugaagguauuaaauacucguauugcu

SEQ ID NO: 55 - RNA, 52 nt, Artificial Sequence; identical to SEQ ID NO: 49
  CasM.295047 guide nucleic acid

SEQ ID NO: 56 - RNA, 52 nt, Artificial Sequence
  CasM.299588 guide nucleic acid
guugcaauuuguauacgagugugacuugaagguauuaaauacucguauugcu

SEQ ID NO: 57 - RNA, 52 nt, Artificial Sequence
  CasM.277328 guide nucleic acid
gcugcaacacgcgcggguacgcggguugaagguauuaaauacucguauugcu

SEQ ID NO: 58 - RNA, 52 nt, Artificial Sequence
  CasM.297894 guide nucleic acid
guugcaacucgcacguuggcacugauugaagguauuaaauacucguauugcu

SEQ ID NO: 59 - RNA, 54 nt, Artificial Sequence
  CasM.291449 guide nucleic acid
gcuguagcccugcucaaauuguagggcgcaugcagguauuaaauacucguauug

SEQ ID NO: 60 - RNA, 56 nt, Artificial Sequence
  CasM.297599 guide nucleic acid
guuguagucgaccugaaucuguggggugcuuacagguauuaaauacucguauugcu

SEQ ID NO: 61 - RNA, 56 nt, Artificial Sequence
  CasM.286588 guide nucleic acid
gguguauguaaccgcaauuugaagggugcauacagguauuaaauacucguauugcu

SEQ ID NO: 62 - RNA, 56 nt, Artificial Sequence
  CasM.286910 guide nucleic acid
guuggaaucgaccuuaauuugaggugugcuuacagguauuaaauacucguauugcu

SEQ ID NO: 63 - RNA, 56 nt, Artificial Sequence
  CasM.286910 guide nucleic acid
gcugaaagagcagagaauuuguugugugcauacagguauuaaauacucguauugcu

SEQ ID NO: 64 - RNA, 56 nt, Artificial Sequence
  CasM.293576 guide nucleic acid
guuggagucggcuugaaucugcggggugcuuacagguauuaaauacucguauugcu

SEQ ID NO: 65 - RNA, 56 nt, Artificial Sequence; identical to SEQ ID NO: 62
  CasM.294537 guide nucleic acid

SEQ ID NO: 66 - RNA, 56 nt, Artificial Sequence
  CasM.298538 guide nucleic acid
guuguaagagacccgaauuuuagcuguguauacagguauuaaauacucguauugcu

SEQ ID NO: 67 - RNA, 56 nt, Artificial Sequence
  CasM.19924 guide nucleic acid
guugugaaugcaggcauuuuugaugguaaauccaacuauuaaauacucguauugcu

SEQ ID NO: 68 - RNA, 56 nt, Artificial Sequence
  CasM.19952 guide nucleic acid
acugucagacaaugcaaaaugugugguacauccaacuauuaaauacucguauugcu

SEQ ID NO: 69 - RNA, 56 nt, Artificial Sequence
  CasM.274559 guide nucleic acid
gcugucaguaguaguaaaaauggggguacauccaacuauuaaauacucguauugcu

SEQ ID NO: 70 - RNA, 56 nt, Artificial Sequence
  CasM.286251 guide nucleic acid
acugucaguacaugcaaaaaugaggguacauccaacuauuaaauacucguauugcu

SEQ ID NO: 71 - RNA, 56 nt, Artificial Sequence
  CasM.288480 guide nucleic acid
acugucagacaaugcaaaaugagugguacauccaacuauuaaauacucguauugcu

SEQ ID NO: 72 - RNA, 56 nt, Artificial Sequence
  CasM.288668 guide nucleic acid
gcuguuagaacauacaaaaugaaagguacauccaacuauuaaauacucguauugcu

SEQ ID NO: 73 - RNA, 56 nt, Artificial Sequence
  CasM.289206 guide nucleic acid
gcugcaugucauggcaaaaggaaagguacauccaacuauuaaauacucguauugcu

SEQ ID NO: 74 - RNA, 56 nt, Artificial Sequence
  CasM.290598 guide nucleic acid
gcugucagacaccuaaaaaaugaggguacauccaacuauuaaauacucguauugcu

SEQ ID NO: 75 - RNA, 56 nt, Artificial Sequence
  CasM.290816 guide nucleic acid
gcugugagucacaguaaaaaugaagguauauccaacuauuaaauacucguauugcu

SEQ ID NO: 76 - RNA, 56 nt, Artificial Sequence; identical to SEQ ID NO: 70
  CasM.295071 guide nucleic acid

SEQ ID NO: 77 - RNA, 56 nt, Artificial Sequence; identical to SEQ ID NO: 75
  CasM.295231 guide nucleic acid

SEQ ID NO: 78 - RNA, 56 nt, Artificial Sequence
  CasM.292139 guide nucleic acid
gauguauaugcuaugauuuuguaugguacauccaacuauuaaauacucguauugcu

SEQ ID NO: 79 - RNA, 56 nt, Artificial Sequence; identical to SEQ ID NO: 69
  CasM.279423 guide nucleic acid

SEQ ID NO: 80 - RNA, 53 nt, Artificial Sequence
  CasM.20054 guide nucleic acid
guugagcucugcauuacgcagaugaaugacgaguauuaaauacucguauugcu

SEQ ID NO: 81 - RNA, 131 nt, Artificial Sequence
  CasM.282673 guide nucleic acid
auaagggcggcucagcguccuaaagucgagaaaguaugcguaaacuucuuucauagaauugcagauacucucggcaagguaaaaacccuacaaauuuaauccuuguaggcgacuuauauuuguguauauuu

SEQ ID NO: 82 - RNA, 52 nt, Artificial Sequence
  CasM.282952 guide nucleic acid
guugcaaucugcguacaggcguaagaugugaguauuaaauacucguauugcu

SEQ ID NO: 83 - RNA, 52 nt, Artificial Sequence
  CasM.283262 guide nucleic acid
gaucauaucugcuuguauggguaugcugcgaguauuaaauacucguauugcu

SEQ ID NO: 84 - RNA, 52 nt, Artificial Sequence
  CasM.284833 guide nucleic acid
guugcaacuuacgcauagguguaaaauacgaguauuaaauacucguauugcu

SEQ ID NO: 85 - RNA, 52 nt, Artificial Sequence
  CasM.287700 guide nucleic acid
gauuauaucugcuuguauggguauacugcgaguauuaaauacucguauugcu

SEQ ID NO: 86 - RNA, 52 nt, Artificial Sequence; identical to SEQ ID NO: 84
  CasM.291507 guide nucleic acid

SEQ ID NO: 87 - RNA, 58 nt, Artificial Sequence
  CasM.293410 guide nucleic acid
ucagcucacaaccuacauaugcauacaagauauaucguuauuaaauacucguauugcu

SEQ ID NO: 88 - RNA, 52 nt, Artificial Sequence; identical to SEQ ID NO: 83
  CasM.295105 guide nucleic acid

SEQ ID NO: 89 - RNA, 52 nt, Artificial Sequence
  CasM.295187 guide nucleic acid
gauauaucuuguaugcauauguagguugugaguauuaaauacucguauugcu

SEQ ID NO: 90 - RNA, 52 nt, Artificial Sequence
  CasM.295929 guide nucleic acid
guugcaaugaacguaugugcaugaggugugaguauuaaauacucguauugcu

SEQ ID NO: 91 - RNA, 82 nt, Artificial Sequence
  CasM.298706 guide nucleic acid
ggggcgucuucccgucccuaaaucgagauagcagccauuuuucuucauuuuugaagacggucuugcacucgaaaaggucaag

SEQ ID NO: 92 - RNA, 84 nt, Artificial Sequence
  CasM.280604 guide nucleic acid
ggggcgacuucccgccccaaaaucgagaaagugacugucagacuuugcuaugcaaagcaaguaauacacucgagaagguaaaga

SEQ ID NO: 93 - RNA, 83 nt, Artificial Sequence
  CasM.281060 guide nucleic acid
agggcgacuucccguccuaaaaucgagaaagugacaauucagucucgcauuucgagcauuguaauacacucgaaaagguuaag

SEQ ID NO: 94 - RNA, 85 nt, Artificial Sequence
  CasM.284933 guide nucleic acid
ggggcgacuucccgucccaaaaucgagaaaguggucguaagucucgaucggaucgaagcagacaauacacucgaaaagguuaagu

SEQ ID NO: 95 - RNA, 82 nt, Artificial Sequence
  CasM.287908 guide nucleic acid
ggggcgacuucccgucccuaaaucgagaaaguggcgguaagacuucggucuucgaagcgcgcaauacacucgaaaagguuaa

SEQ ID NO: 96 - RNA, 83 nt, Artificial Sequence
  CasM.288518 guide nucleic acid
ggggcgacuucccgucccaaaaucgagaaagugacaguaauucuuuguuuuacagagguuguaauacacucgauaagguuaag

SEQ ID NO: 97 - RNA, 83 nt, Artificial Sequence
  CasM.293891 guide nucleic acid
ggggcgaccucccgucccaaaaucgagaaaguggccgucagacuucucgcugagaagcacgcaauacacucgaaaagguaaag

SEQ ID NO: 98 - RNA, 83 nt, Artificial Sequence
  CasM.294270 guide nucleic acid
agggcgacuucccguccugaaaucgagaaagugacaaggaaagcgcaauuuugcgccguuguaauacacucgagaaggucaag

SEQ ID NO: 99 - RNA, 83 nt, Artificial Sequence
  CasM.294491 guide nucleic acid
agggcgacuucccguccuaaaaucgagauagugacaagucagucucuuaugaggagcauuguaauacacucgagaaggucaag

SEQ ID NO: 100 - RNA, 85 nt, Artificial Sequence; identical to SEQ ID NO: 94
  CasM.295047 guide nucleic acid

SEQ ID NO: 101 - RNA, 83 nt, Artificial Sequence
  CasM.299588 guide nucleic acid
agggcgacuucacguccucaaaucgagaaagugagcguaagacuuggcuucugucaagcgguuaauacacucgagaagguuaa

SEQ ID NO: 102 - RNA, 83 nt, Artificial Sequence
  CasM.277328 guide nucleic acid
ggggcgacuucccgucccgaaaucgagaaagugaccgucagacucugcuuugcagagcagguaauacacucgagaagguaaag

SEQ ID NO: 103 - RNA, 83 nt, Artificial Sequence
  CasM.297894 guide nucleic acid
ggggcgucuucccgucccuaaaucgagauagcagccauuuuucuucauuuuuugaagacggucuugcacucgaaaaggucaag

SEQ ID NO: 104 - RNA, 135 nt, Artificial Sequence
  CasM.291449 guide nucleic acid
cacgcuagcugaaaagcaaccgcguacacgcggacgaacggccgaccugcucggccugaagguugagaagguuauguauaagaggagaaaaucccccuucauaaucgcucaccaagcucccaauuuacauauuuu

SEQ ID NO: 105 - RNA, 97 nt, Artificial Sequence
  CasM.291449 guide nucleic acid
cggccgaccugcucggccugaagguugagaagguuauguauaagaggagaaaaucccccuucauaaucgcucaccaagcucccaauuuacauauuuu

SEQ ID NO: 106 - RNA, 135 nt, Artificial Sequence
  CasM.297599 guide nucleic acid
uauugcgcuagccauaauggcaaucgcguacaggcaacugaaggccgaccuguacggccuuaagguugagaaggcacauguaaguggaaaaaugcuuucccguuguguucgcucaccaagcacacacguuuuuuu

SEQ ID NO: 107 - RNA, 96 nt, Artificial Sequence
  CasM.297599 guide nucleic acid
gaaggccgaccuguacggccuuaagguugagaaggcacauguaaguggaaaaaugcuuucccguuguguucgcucaccaagcacacacguuuuuuu

SEQ ID NO: 108 - RNA, 137 nt, Artificial Sequence
  CasM.286588 guide nucleic acid
aggucgccguuuacguugcgucacaagggcgcgcgggcgaccgaaggccgaucuguacggccugcagguugagaaggcacauauuagaggaaaauugcuucccuuuguguucgcucaccgaguauuccuuguuuuuu

SEQ ID NO: 109 - RNA, 87 nt, Artificial Sequence
  CasM.286588 guide nucleic acid
aucuguacggccugcagguugagaaggcacauauuagaggaaaauugcuucccuuuguguucgcucaccgaguauuccuuguuuuuu

SEQ ID NO: 110 - RNA, 138 nt, Artificial Sequence
  CasM.286910 guide nucleic acid
caauguuucgcuaaccuuuaagguaaucgcgggcaggcgacugaaggccgaccuguacggccuuaaggcugagaaggcacauguaaguggaaaaaugcuuucccguuguguucgcucaccaagcacauuuguuuuuuu

SEQ ID NO: 111 - RNA, 96 nt, Artificial Sequence
  CasM.286910 guide nucleic acid
gaaggccgaccuguacggccuuaaggcugagaaggcacauguaaguggaaaaaugcuuucccguuguguucgcucaccaagcacauuuguuuuuuu

SEQ ID NO: 112 - RNA, 136 nt, Artificial Sequence
  CasM.292335 guide nucleic acid
aggccguuaucaacguuucgcggaagagcggacgaacggcugaaggccgaccuguacggccuaaagguugagaaggcacauguaagaggaaaaucgcuucccuuuguguucgcucaccggguacacgcguuuuuuu

SEQ ID NO: 113 - RNA, 93 nt, Artificial Sequence
  CasM.292335 guide nucleic acid
aggccgaccuguacggccuaaagguugagaaggcacauguaagaggaaaaucgcuucccuuuguguucgcucaccggguacacgcguuuuuuu

SEQ ID NO: 114 - RNA, 142 nt, Artificial Sequence
  CasM.293576 guide nucleic acid
ucguaaauguugcgcuagccauaauggcaaucgcguacaggcaacugaaggccgaccuguacggccuuaagguugagaaggcacaugucaguggaaaaaugcuuucccuuuguguucgcucaccaagcacacgcgguuuuuu

SEQ ID NO: 115 - RNA, 95 nt, Artificial Sequence
  CasM.293576 guide nucleic acid
aaggccgaccuguacggccuuaagguugagaaggcacaugucaguggaaaaaugcuuucccuuuguguucgcucaccaagcacacgcgguuuuuu

SEQ ID NO: 116 - RNA, 137 nt, Artificial Sequence
  CasM.294537 guide nucleic acid
aauguuucgcuaaccuuuaagguaaucgcgggcaggcgacugaaggccgaccuguacggccuuaaggcugagaaggcacauguaaguggaaaaaugcuuucccguuguguucgcucaccaagcacauuuguuuuuuu

SEQ ID NO: 117 - RNA, 95 nt, Artificial Sequence
  CasM.294537 guide nucleic acid
aaggccgaccuguacggccuuaaggcugagaaggcacauguaaguggaaaaaugcuuucccguuguguucgcucaccaagcacauuuguuuuuuu

SEQ ID NO: 118 - RNA, 148 nt, Artificial Sequence
  CasM.298538 guide nucleic acid
ggucguuguaaaacguaacgcuagccuuauggcaaucgcgaacgaacgacugaaggccgaccuguacggccugaaggaugagaaggcacauauuagaggaaaaaaaugguucccuuugugaccgcucaccaaacacauguuuauuuuu

SEQ ID NO: 119 - RNA, 96 nt, Artificial Sequence
  CasM.298538 guide nucleic acid
aaggccgaccuguacggccugaaggaugagaaggcacauauuagaggaaaaaaaugguucccuuugugaccgcucaccaaacacauguuuauuuuu

SEQ ID NO: 120 - RNA, 80 nt, Artificial Sequence
  CasM.19924 guide nucleic acid
augaauaggauucguccuauggggcaguugguugcccuuagccugaggcauuuauugcacucgggaaguaccauuucuca

SEQ ID NO: 121 - RNA, 80 nt, Artificial Sequence
  CasM.274559 guide nucleic acid
augaauaggauuuauccuauggggcaguugguugcccuuagccugaggcauuuaaugcacucgggaaguaccuuuucuca

SEQ ID NO: 122 - RNA, 80 nt, Artificial Sequence
  CasM.286251 guide nucleic acid
aagaauaggauucauccuauggggcaguugguugcccuuagccugaggaauuuaauucacucgggaaguaccuuucucau

SEQ ID NO: 123 - RNA, 80 nt, Artificial Sequence
  CasM.288668 guide nucleic acid
auggauaggauucguccuauggggcaguugggaccauguaaugcccuuagccugaggaauucauuucacucgggaaguau

SEQ ID NO: 124 - RNA, 80 nt, Artificial Sequence
  CasM.290816 guide nucleic acid
augaauaggauuuauccuauggggcaguuggaugcccuuagccugaggcauuuauugcacucgggaaguaccuuuucuca

SEQ ID NO: 125 - RNA, 84 nt, Artificial Sequence
  CasM.292139 guide nucleic acid
uauuuucuaaugggguuguuggaaagagcuuuuacugaaauuuguaaaggugcccugaacuugagaauugaaaaauuacucgag

SEQ ID NO: 126 - RNA, 75 nt, Artificial Sequence
  CasM.292139 guide nucleic acid
augggguuguuggaaagagcuuuuacugaaauuuguaaaggugcccugaacuugagaauugaaaaauuacucgag

SEQ ID NO: 127 - RNA, 80 nt, Artificial Sequence; identical to SEQ ID NO: 121
  CasM.279423 guide nucleic acid

SEQ ID NO: 128 - RNA, 122 nt, Artificial Sequence
  CasM.20054 guide nucleic acid
uucgggcggcucggcguccguaaaucgagaaagagcuuguaauuccugauucuaucaggugaagcaacacucgguaagguauaacaauacacauguauaauccguguauuuaaguucauuuu

SEQ ID NO: 129 - RNA, 85 nt, Artificial Sequence
  CasM.20054 guide nucleic acid
uucgggcggcucggcguccguaaaucgagaaagagcuuguaauuccugauucuaucaggugaagcaacacucgguaagguauaac

SEQ ID NO: 130 - RNA, 131 nt, Artificial Sequence; identical to SEQ ID NO: 81
  CasM.282673 guide nucleic acid

SEQ ID NO: 131 - RNA, 84 nt, Artificial Sequence
  CasM.282673 guide nucleic acid
auaagggcggcucagcguccuaaagucgagaaaguaugcguaaacuucuuucauagaauugcagauacucucggcaagguaaaa

SEQ ID NO: 132 - RNA, 111 nt, Artificial Sequence
  CasM.282952 guide nucleic acid
auucuuuccucggaaagugguagauacucucgguaagguaaacuguguaugaacaguuugaaauccugcacauaaaauccgugcaggcaucuuauaguuuugugcaucuuu

SEQ ID NO: 133 - RNA, 91 nt, Artificial Sequence
  CasM.282952 guide nucleic acid
auucuuuccucggaaagugguagauacucucgguaagguaaacuguguaugaacaguuugaaauccugcacauaaaauccgugcaggcauc

SEQ ID NO: 134 - RNA, 129 nt, Artificial Sequence
  CasM.283262 guide nucleic acid
uucgggcggcucggcguccguaaaccgagaaaguauauguaagucugaauuuauucagcguuagauacacucgguaagguucaaacaauacauauucaauccauguauucaguauauuuguacauuuuu

SEQ ID NO: 135 - RNA, 86 nt, Artificial Sequence
  CasM.283262 guide nucleic acid
uucgggcggcucggcguccguaaaccgagaaaguauauguaagucugaauuuauucagcguuagauacacucgguaagguucaaac

SEQ ID NO: 136 - RNA, 133 nt, Artificial Sequence
  CasM.284833 guide nucleic acid
uucagggcgacucggcguccuaaaaucgagaaaguguacauaaauuuuuaacaaaauacgguaaauacucucgguaagguuuuaacgugcacauaauaauccgugcaacaggguuacacuuuugugcaauuuu

SEQ ID NO: 137 - RNA, 86 nt, Artificial Sequence
  CasM.284833 guide nucleic acid
uucagggcgacucggcguccuaaaaucgagaaaguguacauaaauuuuuaacaaaauacgguaaauacucucgguaagguuuuaac

SEQ ID NO: 138 - RNA, 86 nt, Artificial Sequence
  CasM.287700 guide nucleic acid
uucgggcggcucggcguccguaaaccgagaaaguauauguaagucugaauuuauucagcguuagauacacucgguaagguuuaaac

SEQ ID NO: 139 - RNA, 133 nt, Artificial Sequence
  CasM.291507 guide nucleic acid
uucagggcgacucggcguccuaaaaucgagaaaguguacauaaguuuuuaacaaaauacgguaaauacucucgguaagguuuuaacgugcacauaauaauccgugcaacaggguuacacuuuugugcaauuuu

SEQ ID NO: 140 - RNA, 87 nt, Artificial Sequence
  CasM.291507 guide nucleic acid
uucagggcgacucggcguccuaaaaucgagaaaguguacauaaguuuuuaacaaaauacgguaaauacucucgguaagguuuuaacg

SEQ ID NO: 141 - RNA, 133 nt, Artificial Sequence
  CasM.293410 guide nucleic acid
uauuaagggcggcucagcguccuuaagucgagaaaguauacauaaauuucuuauauagaauaguagauacucucggcaagguauaaacccuacaaauuuaauccuuguaggcaacuuauauuuguauuuauuu

SEQ ID NO: 142 - RNA, 89 nt, Artificial Sequence
  CasM.293410 guide nucleic acid
uauuaagggcggcucagcguccuuaagucgagaaaguauacauaaauuucuuauauagaauaguagauacucucggcaagguauaaacc

SEQ ID NO: 143 - RNA, 130 nt, Artificial Sequence
  CasM.295105 guide nucleic acid
uuucgggcggcucggcguccguaaaccgagaaaguauauguaagucugaauuuauucagcguuagauacacucgguaagguucaaacaauacauauucaauccauguauucaguauauuuguacauuuuu

SEQ ID NO: 144 - RNA, 87 nt, Artificial Sequence
  CasM.295105 guide nucleic acid
uuucgggcggcucggcguccguaaaccgagaaaguauauguaagucugaauuuauucagcguuagauacacucgguaagguucaaac

SEQ ID NO: 145 - RNA, 134 nt, Artificial Sequence
  CasM.295187 guide nucleic acid
auauuaagggcggcucagcguccuuaagucgagaaaguauacauaaauuucuuauauagaauaguagauacucucggcaagguauaaacccuacaaauuuaauccuuguaggcaacuuauauuuguauuuauuu

SEQ ID NO: 146 - RNA, 89 nt, Artificial Sequence
  CasM.295187 guide nucleic acid
auauuaagggcggcucagcguccuuaagucgagaaaguauacauaaauuucuuauauagaauaguagauacucucggcaagguauaaac

SEQ ID NO: 147 - RNA, 133 nt, Artificial Sequence
  CasM.295929 guide nucleic acid
aaacaagggcggcucaacguccuagaaucgagaaaguaugcguaagacuuauuuauugagcgguagauacucucgguaagguauaaauuccacaaugaaaauccuguggacaccguauaauaugugcauguuu

SEQ ID NO: 148 - RNA, 90 nt, Artificial Sequence
  CasM.295929 guide nucleic acid
aaacaagggcggcucaacguccuagaaucgagaaaguaugcguaagacuuauuuauugagcgguagauacucucgguaagguauaaauuc

SEQ ID NO: 149 - RNA, 98 nt, Artificial Sequence
  CasM.19924 guide nucleic acid
uggggcaguugguugcccuuagccugaggcauuuauugcacucgggaaguaccauuucucagaaaugguacauccaacuauuaaauacucguauugcu

SEQ ID NO: 150 - RNA, 99 nt, Artificial Sequence
  CasM.274559 guide nucleic acid
auggggcaguugguugcccuuagccugaggcauuuaaugcacucgggaaguaccuuuucucagaaaugguacauccaacuauuaaauacucguauugcu

SEQ ID NO: 151 - RNA, 99 nt, Artificial Sequence
  CasM.286251 guide nucleic acid
auggggcaguugguugcccuuagccugaggaauuuaauucacucgggaaguaccuuucucaugaaaugguacauccaacuauuaaauacucguauugcu

SEQ ID NO: 152 - RNA, 99 nt, Artificial Sequence
  CasM.290816 guide nucleic acid
auggggcaguuggaugcccuuagccugaggcauuuauugcacucgggaaguaccuuuucucagaaaugguacauccaacuauuaaauacucguauugcu

SEQ ID NO: 153 - DNA, 136 bp, Artificial Sequence
  CasM.292139 guide nucleic acid
ttattagaaatgaaatattttctaatggggttgttggaaagagcttttactgaaatttgtaaaggtgccctgaacttgagaattgaaaaattactcgaggaaatggtacatccaactattaaatactcgtattgct

SEQ ID NO: 154-169 - skipped (16 entries)

SEQ ID NO: 170 - protein, 5 aa, Artificial Sequence
  Linker
GSGGS

SEQ ID NO: 171 - protein, 6 aa, Artificial Sequence
  Linker
GGSGGS

SEQ ID NO: 172 - protein, 4 aa, Artificial Sequence
  Linker
GGGS

SEQ ID NO: 173 - protein, 4 aa, Artificial Sequence
  Linker
GGSG

SEQ ID NO: 174 - protein, 5 aa, Artificial Sequence
  Linker
GGSGG

SEQ ID NO: 175 - protein, 5 aa, Artificial Sequence
  Linker
GSGSG

SEQ ID NO: 176 - protein, 5 aa, Artificial Sequence
  Linker
GSGGG

SEQ ID NO: 177 - protein, 5 aa, Artificial Sequence
  Linker
GGGSG

SEQ ID NO: 178 - protein, 5 aa, Artificial Sequence
  Linker
GSSSG

SEQ ID NO: 179 - skipped

SEQ ID NO: 180 - RNA, 98 nt, Artificial Sequence
  sgRNA guide nucleic acid
uggggcaguugguugcccuuagccugaggcauuuauugcacucgggaaguaccauuucucagaaaugguacauccaacucuaggcgcccgcuaaguuc

SEQ ID NO: 181 - RNA, 98 nt, Artificial Sequence
  sgRNA guide nucleic acid
uggggcaguugguugcccuuagccugaggcauuuauugcacucgggaaguaccauuucucagaaaugguacauccaaccccggguaagccugucugcu

SEQ ID NO: 182 - RNA, 98 nt, Artificial Sequence
  sgRNA guide nucleic acid
uggggcaguugguugcccuuagccugaggcauuuauugcacucgggaaguaccauuucucagaaaugguacauccaaccgugcuguuuccuccccacg

SEQ ID NO: 183 - RNA, 98 nt, Artificial Sequence
  sgRNA guide nucleic acid
uggggcaguugguugcccuuagccugaggcauuuauugcacucgggaaguaccauuucucagaaaugguacauccaacgugccuuaguuucuucaucu

SEQ ID NO: 184 - RNA, 98 nt, Artificial Sequence
  sgRNA guide nucleic acid
uggggcaguugguugcccuuagccugaggcauuuauugcacucgggaaguaccauuucucagaaaugguacauccaacgggggcgggggggagaaaaa

SEQ ID NO: 185 - RNA, 98 nt, Artificial Sequence
  sgRNA guide nucleic acid
uggggcaguugguugcccuuagccugaggcauuuauugcacucgggaaguaccauuucucagaaaugguacauccaacgcgcccuccgaucuggggug

SEQ ID NO: 186 - DNA, 78 bp, Artificial Sequence
  Engineered guide nucleic acid
tggggcagttggttgcccttagcctgaggcatttattgcactcgggaagtaccatttctcagaaatggtacatccaac

SEQ ID NO: 187 - protein, 18 aa, Artificial Sequence
  NLS Sequence
  misc_feature (3)..(13): Xaa can be any naturally occurring amino acid
KRXXXXXXXXXXXKKRKR

SEQ ID NO: 188 - protein, 19 aa, Artificial Sequence
  NLS Sequence
  misc_feature (3)..(14): Xaa can be any naturally occurring amino acid
KRXXXXXXXXXXXXKKRKR

SEQ ID NO: 189 - protein, 18 aa, Artificial Sequence
  NLS Sequence
  misc_feature (3)..(13): Xaa can be any naturally occurring amino acid
  misc_feature (17)..(17): Xaa can be any naturally occurring amino acid
  MISC_FEATURE (18)..(18): Xaa = Lysine/ Arginine
KRXXXXXXXXXXXKKRXX

SEQ ID NO: 190 - protein, 19 aa, Artificial Sequence
  NLS Sequence
  misc_feature (3)..(14): Xaa can be any naturally occurring amino acid
  misc_feature (18)..(18): Xaa can be any naturally occurring amino acid
  MISC_FEATURE (19)..(19): Xaa = Lysine/ Arginine
KRXXXXXXXXXXXXKKRXX

SEQ ID NO: 191-199 - skipped (9 entries)

SEQ ID NO: 200 - protein, 20 aa, Artificial Sequence
  Endosomal escape protein
  MISC_FEATURE (4)..(4): Xaa is independently selected from lysine, histidine, and arginine
  MISC_FEATURE (8)..(8): Xaa is independently selected from lysine, histidine, and arginine
  MISC_FEATURE (11)..(11): Xaa is independently selected from lysine, histidine, and arginine
  MISC_FEATURE (15)..(15): Xaa is independently selected from lysine, histidine, and arginine
  MISC_FEATURE (19)..(19): Xaa is independently selected from lysine, histidine, and arginine
GLFXALLXLLXSLWXLLLXA

SEQ ID NO: 201 - protein, 20 aa, Artificial Sequence
  Endosomal escape protein
GLFHALLHLLHSLWHLLLHA

SEQ ID NO: 202 - protein, 483 aa, Artificial Sequence
  CasM.19498
LHETEKSLKFAEKYIAMPTITRKIELTLCTEGLSDEQRKEQWGLLYHINDNLYKAANNISSKLYLDEHVSSMVRMKHAEYLSLQKELARAEKQKVDDAIIVELTRKLAVAEKEMTDQELAICKYATEMSTNTLAYNFAKEIETKIFGQILACLENNAHALFVDDSPNVRRGERAIRNYKKGMPIPFPWNRSIKIEADGGEFYLRWYNGLRFLLTFGKDRSNNRLIVKRCMKMDEVFEGEYKLCNSSIQLAKRDGKPKLFLLLVVNIPQEHVELNKNIVVGVDLGVNVPAYVATNITEERKAIGDREHFLNTRMTFQKRYKSLQRLKGTAGGKGRTKKLEPLERLRDAERNWVHTQNHLFSREVVNFAVQARAATINIEDLSGFGKDNDGNADEKKEFVLRNWSYYELQNMITYKASKYGIKVEKIRPDYTSKTCSWCGQQGFREGVTFICENPECKQHGEKIHADYNAARNIANSKDIIKKNE

SEQ ID NO: 203 - protein, 467 aa, Artificial Sequence
  CasM.19548
MAETKRLQKVAKFQIVKPVNMSWDELGRMLRDVRYRLSRLANMAVSETYQNLHQRYRLKNQDAPKSLKIGQLSRNLRKILREEGVEEENLSKYSKTCVLPDTITGAFSRYKLSSIDWRKVLTGKISVPNYKTNLSIPIRCDKPHQRRLELTETGEIEADLMICNKPYPRVLLSTRTISDGQRTVLERLVSNKTNFLPGYRHRFFEVKEKKGKWELSVTYDFPKAEATRLHPDIIVGVDLGWSVPLYAAINNGYARIGYRKFEPLAKRIKHLQKQIKGRRFSTQKGGVKDLAQPTARAGHGRKRILKPIEKLEYKIDNAYTTLNHQLSHCVVEFAKNNGAGLIQIENLEGLKDDLSGTFIGQNWRYNQLQNFIKYKADEAGIKVHPVNPCYTSRRCSHCGFIHISFDREYRDKNRKNGKATMFECPKGCKPLNADYNAAKNLATFDIEEKIRLQCKQQSIEYKELPKD

SEQ ID NO: 204 - protein, 472 aa, Artificial Sequence
  CasM.19910
MPGTEKRLQKVATFEIVKPVNMSWPEFGKMLRDVRYRYWRLANMAVCENYMRFYQWRTQQTDANDRYKVKTLNRILRKMLIEEKNADEKELSRYSRDGAVSGYICGAFEKTKLSAVKSSSKWKKVIAGKESLPLFKKDLAIPINCSDHQPRLIERTQSGEYEVDLRICQQPYPRVLLSTAKISDGQKAILERLVSNETNSLPGYRHRFFEIKEKRNKWYLSVSYDFPKIDATRLHPNIIVGVDLGWSVPLYAAISNGYARIGYRKLKALGDRIKALQRQTIARRRSIQRTGEQDLSAPTARSGHGRKRILHPIEKLEGKIDNAYKTLNHQLSHCVIEFAKNHGAGLIQVENLKGLAEELSGTFIGQNWRYNQLQEFIKYKAKEAGIEVKEVNPCYTSRRCSECGFIHKEFTFEYRQANKKTDKATMFECPKCGYKAIADYNAARNLANPDIAEKIRLQCKEQGIEYKELPKD

SEQ ID NO: 205 - protein, 468 aa, Artificial Sequence
  CasM.19948
MPTITRKIELHFCTEGLSDEKQKEQRQLLYHINDNLYKAANNISSKLYLDEHVSSMVRLKHADYLSLQRELARAEKQKTPDDELITELSRKLSAAEKEMTDQELAICKYATEMATSTLAYNFAKEMETEIFGQILACLENNAHAVFVDDSLSVKRGERAIRNYKKGMPIPFPWNKNIKIETKDCEFYLRWYNGIRFRLHFGKDRSNNRLIVQRCLKLDDNFESEYKLCNSSIQLDKRDGKTKLFLLLVVNIPQEHVELNKNIVVGVDLGLNYPAYVATNSTEERKYIGDRDHFLKIRMQFQSRYKSLQRLKGTAGGKGRAKKLEPLERLRKAERNWVHTQNHLFSRDVVNFAVQTHAATIHMEDLSGFGKDNDGNADEKKEFVLRNWSYYELQSMIEYKAAKYGIKVEKIRPAYTSKTCSWCGQQGDRKSTTFICENPECKHYGESIHADYNAARNIANSKDIVKKNE

SEQ ID NO: 206 - protein, 453 aa, Artificial Sequence
  CasM.265291
MSKITRKIEIIPDIDGITHEESNKKCYNTFYKFDRKLYKVANLLVSQLYGLDNLLSLMRLQNDEYVKCQSKLSFKSITDATKEEIKKRMQEIDAELVSMKNDIAPKHPQTYSYRAVTSSEYAKDIPSDILNNLKQDVYQHFNENKKEQIRGERSLATYKKGMPIPFSFEKRHVIICDGDNYYLPWFEDTRFRLNFGRDRSNNRAIIDNCIKTKKYKLCAAAKIQLKERKLFLLITVDIPKAESVPVKGKVMGVDLGVINPAYVAVNDGPERSRIGNGEAFQKQRDVFRRRFRELQRSQLTQGGHGRKHKTKATEILRGKERNWVQTENHRISREIVNLASRWKVETIQMESLKGFGKNQEGEVEYNHKRLLGRWSYFELQKDIEYKAAMAGIAVQYVNPAYTSQTCHVCGQRGNRIERDTFICTNPECTCYNQAQDADMNAAINIAKSKDVIK

SEQ ID NO: 207 - protein, 468 aa, Artificial Sequence
  CasM.270012
MPTITRKIELTLCTDGLSDEERKAQWGLLYHINDNLYKAANNISSKLYLDEHVSSMVRLKHAEYLSLQKELAKAERQKMPDVDVIEELRERLSAAEQEMSDQELAICKYATEMSTNTLAYRFATEIETNIFGQILARLENNAQAVFLTDAPDVKRGERAIRNYKKGMPIPFPWNNSIKIECEGGEFYLRWYSGLRFHFNFGKDRSGNRLIVQRCLKLDKEYDGEYKLCNSSIQMVKRDGSTKFFLLMVVNIPQEYVELNKHIVVGVDLGINVPAYVATNITPERKAIGDREHFLNTRMAFQRRYKSLQRLKTTAGGKGRTKKLEPLERLRQAEHNWVHTQNHLFSREVVNFALQTHAATIHLEDLSGFGKDSDGNADERKEFVLRNWSYYELQNMITYKAAKYGIRVEKIRPAFTSRTCSCCGHEGFREGVTFICENPECQQFGEKVHADYNAARNIANSKDIIKKNE

SEQ ID NO: 208 - protein, 468 aa, Artificial Sequence
  CasM.272451
MPTITRKIELTLCTEGLSEEQRKEQWGLLYHINDNLYKAANNISSKLYLDDHVSSMVRMKHAEYLSLLKELARAEKQKTPDADAIAELRKKVAAAEKEMTDQEHAICKYATEMSTETLAYKFATEIETNVFGQILACLKQAAQSNFKNDAKDVKRGERAIRNYKKGMPIPFPWNDSLRIEKDNKDFYLRWYNGLRFLFNFGKDRSNNRLIVERCLKMDADYDGEYKLCNSSIQIAKREGKVKLFLLLVVSIPQEHVELNKKVVVGVDLGINVPAYVATNITEERKAIGDREHFLNTRMAFQRRYKSLQRLKGTAGGKGRTKKLEPLERLRKAEHNWVHTQNHLFSREVVDFAVKTHAATIHMEDLSGFGKDNDGNADERKEFVLRNWSFYELQNMITYKAAKYGIKVEKIRPAYTSKTCSCCGRQGFRSGVTFICENPECKQYGEKVHADYNAARNIANSKEIIKKNE

SEQ ID NO: 209 - protein, 480 aa, Artificial Sequence
  CasM.274429
MKNNVEEKRPDKEKRLTKVATFQIVKPVNMSWSEFGKMLRDVRYRLSRLANMAVSEAYQNLHQRYRLKNQNAPKSVKIGQISRDLRKILLEEGLEEENLSKYSKMCVLPDTITGAFSRYKLSTIDWRKVLTGKISIPNYKANLSIPIRCDKPQQRRLERTETGEIEVDLMICNKPYPRVLLSTRTISDGQRSVLERLVLNNANSLPGYRHRIFEIKEKRNEWYLSVTYDFPKAETTKLHSDIIVGVDLGWSVPLYAAINNGYARIGYKQLKPLGDSIKALQRQTIARRRSIQRGGTQDLAAPTARSGHGIKRILQPIEKLEGKIDNAYKTLNHQLSHCVIEFAKNHGAGVIQIENLKGLAEELSGTFIGQNWRYYQLQEFIKYKAKEAGIIVKEVNPFYTSRRCSECGYIHKDFTFEYRQANRKNGKSTMFECPKKEEKGCKPLNADYNAARNLATSDIEDKIRLQCKEQGIEYKEIKEK

SEQ ID NO: 210 - protein, 442 aa, Artificial Sequence
  CasM.277378
VTLLVKVVKIHLISEQFDKAGNRIDYKEVNKILWELQKQTREAKNKTVQLLWEWNNFSSDYVKASGIYPKAKDIFGYSSVHGQANKELRTKLILNSSNLSTTTMDVCKIFNTYKKEVWEGKRSVPSYKSDQPLDLHNDSIKLIYENKEFYVRLGLLNRAGFAKYGFKDGFRFKMQVKDNSTKTILERCFDGIYTIVASKLLYDQKKNRWKLNLSYSFDNKNISELDKEKILGVDVGVSCPLVASVFGDRDRFIIKGGEIEKFRKSVEARRRSMLEQTKYCGDGRIGHGRKKRTEPALNIGDKIARFRDTTNHKYSRALIEYAVKKGCGTIQMEKLTGITSKADRFLKDWTYYDLQTKIENKAKEVGINVVYIAPKYTSQRCSKCGYIHKDNRPNQAKFRCLKCDFESNADYNASQNIGIKNIDKTIKKERKKQKSEAQVNEK

SEQ ID NO: 211 - protein, 492 aa, Artificial Sequence
  CasM.280852
MAGKKKDKDVINKTLSVRIIRPRYSDDIEKEISDEKAKRKQDGKTGELDRAFFSELKSRNPDIITNDELFPLFTEIQKNLTEIYNKSISLLYMKLIVEEEGGSTASALSAGPYKECKARFNSYISLGLRQKIQSNFRRKELKGFQVSLPTAKSDRFPIPFCHQVENGKGGFKVYETGDDFIFEVPLIKYTATNKKSTSGKNYTKVQLNNPPVPMNVPLLLSTMRRRQTKKGMQWNKDEGTNAELRRVMSGEYKVSYAEIIRRTRFGKHDDWFVNFSIKFKNKTDELNQNVRGGIDIGVSNPLVCAVTNGLDRYIVANNDIMAFNERAMARRRTLLRKNRFKRSGHGAKNKLEPITVLTEKNERFRKSILQRWAREVAEFFKRTSASVVNMEDLSGITEREDFFSTKLRTTWNYRLMQTTIENKLKEYGIAVNYISPKYTSQTCHSCGKRNDYFTFSYRSENNYPPFECKECNKVKCNADFNAAKNIALKVVL

SEQ ID NO: 212 - protein, 487 aa, Artificial Sequence
  CasM.281050
MPDTDKGKRLTKVATFQIVKPVNMSWNEFGKMLHDVRYRYWRLANMAVCENYMRFYRWRTQQTDTNDHYKVKIINGILRKMLIEEKNADEKELSRYSRDGAVSGYVYGAFTQTKLSAITSKSKWGEVIKGKSALPLFKRDTSIPIMCTDKKPSMIEKTASGEYEVDLRICLKDKQLRPNGYPSVLLSTTKISDGQKAVLERLVSNKTNSLPGYRHRFFEVKEKRGDWYLSVSYDFPQAEATRLHPDIIVGVDLGWSVPLYAAINNGYARIGWRKLEPLAKSIKHLQKQTIVRRRSFQKGGKKDLAASTARTGHGIKRILQPIEKLEGKIDNAYKTLNHQLSHCIIEFAKNHGAGVIQIENLKGLAEELSGTFIGQNWRYHQLQEFIKYKAEEAGIAVKEVNPRYTSRRCSKCGYIHIGFDREYRDKNRKNGKSTMFECPECSKRIKDYKPLNADYNAAKNLATADIEEKIRLQCKEQGIEYKELPKD

SEQ ID NO: 213 - protein, 471 aa, Artificial Sequence
  CasM.285333
MPTITRKIKLELCTKGLSEEERKAQWNLLYHINDNLYRSANNISSKLYLDEHVSSLVWLKHKEHQTLKADLAKAKKQKIQDEKTIAELESRLKSCESEMSDQELAICKYTDEMSSKTLSYKFATELELNIYAQILTQVQSKVYADFQNDQKDVRDGKRAIRTYKKGMPIPFPWRNNIRMEPVKKGREYEFYIKWYNDIRFQLIFGKDRSNNRLILQRCFKLDENCVEDYQMRTSSIKMVKGANGTELFLYLVVDIPQEKHILNNKIVVGVDLGINVPAYVATNVTDDRKAIGDREHFLNTRMAISKRFHSFQRLKGTTGGRGKTKKLEPLERLKEKERNWVHTQNHLFSRDVITFALHVKAATIQMEDLSGYGKDDEGNVVEEKKFLLGKWSYYELQEMIKYKAKKVGMRVNFIKPAYSSQTCSWCGERGERNSTSFVCTNSECSHYGEDLHADYNAARNIARSKNIIRYE

SEQ ID NO: 214 - protein, 377 aa, Artificial Sequence
  CasM.286285
MIITRKIQILFAAQGEEFKKDKDTLYKWSNIVHHASNIVASNKYVCDHLQGMVYLTEEGKEAVSELSQKVDDIFNTSRMNTTYRMISSLYKGEIPTDILSCVNMQVSKLYNKERKKMADGDRSLRSYRSNIPIPFSANSLMRKWKYADKEYSFDLFGIPFKVVLGKDKSNNRSILERLMDGTYKAATSSIKIQNCEDETGKKTRKFFLLLCVEIPDKSYAGREDNILFAELSIDHPLLVSFPIKKEESKPIPIGNKQSYLYKRLQIQKGLDSCKASCKWNKGGRGRKRKMKSTERFKAKEHNFVDAYMHQISAALIKFAIKHDIGKLCLVDVDKKIKEAKESPFVLRNWSYYSLLTKIQYKAKMNGITVVMVDKNVL

SEQ ID NO: 215 - protein, 483 aa, Artificial Sequence
  CasM.286678
MPTITRKIRLHLCTDGLSEEERKAQWKMLYRINDNLYRAANNISSKLYLDEHISSMVRLKHAEYTSLKTELLKAKKADDEETVAELEARINVLNAELSAQEEAICSYATEMATRTLAGKFASELDLNIYGQILAEVKSVVFKNFNSDSKDVREGKRSIRTYKKGMPIPFPWNKTIRLEAVKKESSSKHDEDEYEVYLNWYKSSRTEKKAIRFRLDFGKDKSNNQQIVKRCLNLDNTSSESYQLQTSSIQMKKGSEGAELYLLLVVNIPQDQHVLNKKIVVGVDLGINVPAYVATNCTEERKSIGDREHFLNARIAFHRRFHSFQKLKGTTGGRGRKKKLEPLERLREKERNWVHTQNHLISRDVINFALQTKAATIQMEDLSGYGKDEEGNVKPENKFLQSRWSYFELQSMIKYKAAKCGIKVNLINPSYTSQTCSWCGQMGVRESTSFVCQNPECKKYGKDIHADYNAARNIARSNKTVKNE

SEQ ID NO: 216 - protein, 478 aa, Artificial Sequence
  CasM.287128
MPTITRKIELRLCTEGLSDEERKAQWMLLYHINDNLYRSANNISSKLYLDEHVSSMVRLKHAEYQSTAAELLKAKKNNADEGTISTLEDKVETLKTEMSAQGIAICNYATEMATRTLAGKFASELELNIYGQILAEVKNVVHTNFTNDAKEVREGKRSIRTYKKGMPIPFPWNKSIKIEPVKASSQNEGQDDYEFYLKWYNGLKFILHFGKDRSNNRQILKRCFGLDNLCNERYQMRTSSIQMKKGSNGMELYLLLVLSIPKEQHSLNKKVVVGVDLGINVPAYVATNCTEERRAIGDREQFLNTRMAIIRRKHSFQRLKGTAGGRGRKKKLDPLERLRETERNWVHTQNHLYSRDIIKFALETKAATIQMEKLKGFGRDDNGNVIEEKKFLLGKWSYYELQNMIKYKAGKVGIKVNFIAPAYTSQTCSCCGVRDDRNRKSTSFICHNPDCQMYGKEIHADYNAARNIARSKNVIKDE

SEQ ID NO: 217 - protein, 468 aa, Artificial Sequence
  CasM.287826
MPAITRKIELTLCTEGLSEEQRKEQWGLLYHINDNLYKAANNISSKLYLDEHVSSMVRMKHADYLSLLKELARAEKQKTPDDELIAELREKLSLAEQEMTDQELAICNYATEMATSTLAYNFAKEIETEIFGQILACLENNAHAVFVDDSPTVRRGERAIRNYKKGMPIPFPWNKSIRIVEKDGEFYLRWYNGMRFLLTFGKDRSNNRIIMKRCLKMDQDFEGEYKLCNSSIQMVKREGKTKLFLLIVVNIPQEHVELNKNIVVGVDLGVNVPAYVATNITEERKAIGDREHFLNTRMQFQRRYKSLQRLKGTAGGKGRTKKLEPLERLRKAEHNWVHTQNHLFSREVVNFAVQTRAATIHMEDLSGFGKDNDGNADEQKEFVLRNWSFYELQNMIAYKAAKYGIKVEKVKPAYTSKTCSWCGQLGFRQGVTFICENPACKQCGEKVHADYNAARNIANSKDIIKKNE

SEQ ID NO: 218 - protein, 478 aa, Artificial Sequence
  CasM.287896
MAGQRHTKVAKFQILKPAADMRWSELGRLLRDAQYRVYRLANLALSEKYLRFHLFRTGQTESLPECRIGRLNRQLRQMLKDEGGADDSVLDRFSRTGALPDTVVGALWQYRLHALTKGEKWNKVTRGETALPTFRRSMALPIRCDKRIHHRLERAALDSVELDLMICTRPYPRVILKTAKLDDGAAAILERLLDNEGQLLEGYRQRCFEVRYAEDEKAWWLHVTYDSPATPAPHLSKDIIVGVDLGFSCPMYVALSNGDARLGRRQFAALAARIRSLQTQVMARRRQMLSGGKASLSGDTARSGHGRKRKLLPIESLEGRINRAYTTLNHQLSISVVHFAVHHGAGVIQIENLEGLQNELTGTFLGQRWRYHQLQEFLNYKANEAGIEVRRVNPRYTSRRCSKCGYIHVDFNRAFRDAARQEGKVARFCCPKCEYEAHPDYNAARNLATVDIEGIIKVQCERQGIDRPSVENQDEVAK

SEQ ID NO: 219 - protein, 469 aa, Artificial Sequence
  CasM.287936
MPTITRKIELTLCTEGLSDQERKDQWNLLYHINDNLYRAANNISSKLYLDDHVGSMVRLKHAEYLSLLRALEKAKKQKAPDEEVIAELSQQVATAEQEMDEQAKAICQYATEMSTQTLSYRFATELETNIFGQILTCLRQGVFSTFNSDARDVKRGERSIRTYKKGMPIPFPWNDSLRIGFEDGEFYLRWYNGLRFRFDFGKDRSNNRLIVQRCMKMDKDYEGDYKLCNSSIQMVKREGKPKFFLLLVVNIPQERVELNKNIVVGVDLGINAPAYVATNTTPERKQIGDREHFLNERMAFQRRFKSLQRLKSTTGGRGRAKKLEPLERLRKAEQNWVHTQNHLFSREVIDFAVKARAATIHMEDLSGFGKDRDGNADERKEFVLRNWSYYELQNMITYKAAKYGIKVEKIRPAYTSKTCSWCGHQGFREGITFICENPECKKFGEKEHADYNAARNIANSKEIIKNNEE

SEQ ID NO: 220 - protein, 469 aa, Artificial Sequence
  CasM.288450
MPTITRKIELSLCTDGLSDEQLKEQRQLLYHINDNLYRAANNVSSKLYLDEHVSSMVRLKHADYLSLLRDLARAEKQKSPDEALISELRSKLAAAQREMTEQELAICRYATEMSTQSLSYRFVTEMETHIFAKILDCLKQGVYATFNSDARDVKRGERSIRNYKKGMPIPFAWSDSVRIEQEADEFYLRWYNGIRFRLVFGKDRSNNRLIVKRCLKLDKDYEGDYKLCNSSVQMVKREGKPKTFLLLVVKIPQEQVELNKKIVLGVDLGINYPVYAATNCTEERIYFGEREHFLNTRMQFQRRYKSLQRLKGTTGGKGRKKKLEPLERLRKAERNWVHTQNHLFSQKTVDFALQTHAATIHLEDLSGFGRDSDGSAEEKKEFVLRNWSYYELQQMITYKAAKYGIKVEKIRPAYTSQTCSWCGQRGFRQGVTFICENPECKKCGEKEQADYNAARNIAKSKDVIKDDDE

SEQ ID NO: 221 - protein, 453 aa, Artificial Sequence
  CasM.288712
MSIVTRKIELIPDIENLTHEESNQRCYKLLYNIDKKLYKLANLLVCQLFGLDNLLSLMRLQNDEYVKFQSKLASKSISKETQKNIKEHMKEIDKELLARKAEIAPKSPLTFAYRAIKGSLYAKDLPSDIFNTLKQDVFKHFNETKKEQLRGERSLATYKRGIPIPFSLMKKNVIVSEGDNYYLTWFEETRFKLNFGKDRSNNRAIIDNCLKTNKYKLCTAAKIQLKNKKLFFLVTVDIPETKNTIIKGKVMGVDLGVVHPAYVAVNDGPERSLIGDGDAFQKQRDVFRRRFKELQRCQLTQGGHGRKHKTKATEILRGKERNWVQTENHRISRKIVNLAIRWKVESIQMENLKGFGKDSEGEVETKHKRLLGRWSYFELQKDIEYKAQKAGIKVVYINPAYTSQTCHVCGKKGDRTERDTFICLNTECSCYGKPQDADMNAAINIARSKNIVK

SEQ ID NO: 222 - protein, 468 aa, Artificial Sequence
  CasM.289248
MPTITRKIELMLCSEGLSDEQRKEQWGLLYHINDNLYKAANNISSKLYLDEHVSSMVRMKHAEYLSLLKELARAEKQQTPDEGLIAELSRKLSAAEKEMADQELAICKYATEMSTQTLSYNFAKEIETNIFGQILTCLRQGVYATFNSDAKDVKRGERAIRNYKKGMPIPFPWNKSLKIEAEGGDFYLRWYNGLRFLLTFGKDRSNNRMIVKRCMKMDEDFEGEYKLCNSSIQLAKRDGKPKLFLLLVVNIPQEHVELNKKIVVGVDLGVNVPAYVATNITEERKAIGDREHFLNTRMAFQRRYKSLQRLKGTAGGKGRTKKLEPLERLRDAERNWVHTQNHLFSREVVNFAVQARAATIHMEDMSGFGKDKDGNADEKKEFVLRNWSFYELQNMIAYKSAKYGIKVVKIRPAYTSKTCSWCGQQGERKSTTFICENPECKHYGESIHADYNAARNIANSNDIVKENE

SEQ ID NO: 223 - protein, 385 aa, Artificial Sequence
  CasM.289726
MVITRKIEVFVCESDNDLRRSYYEKLYDIRNIAQEAANRATSMLYAIDNLIPCLDEDSRKLIQYIGAKGTPASRQNAAYTIMSHLYKDRMPGIMDMLSNLAQYVTKNYSEDRKRGMYKNALRSYKCSLPVPYQKKSFKGLRFNWYEDSDGDAHEGCFFSLAGVPLQMRFGRDRSNNRLIVERVISGEYKMCTSSLKFDGKKLFLLLCVDIPKQEANVDPKKTLYAYLGVMNPIICTCDVRAKQEYDSGYKCFEIGTKEEFNYRRRQIQEAVRRCQINNRYSSGGKGRKKKCQAIERWHEKEKNYVDTKLHTYSRMLVDLAVAHKCGTIVLLNQKKREDKAKDDNQNGEPFVLRNWSYYNLKDKIGYKCKLAGIKLVQDKEETEEE

SEQ ID NO: 224 - protein, 372 aa, Artificial Sequence
  CasM.289802
MVITRKIEVFVCEDSKDLRKEYYDKIYKCRDIAVKTANLGVSHLFMLDNTTPYLSDDDREKLTFLGCSGKKATKQNAPYVAASEKFKGQADMSMLSSVLQNVGKMYQDDKKKGMWSKSLRSYKANMPIPFKASCYRNLRFADYNDKEDKPHNGCFFTLMGIPFQCKFGKDRSGNRIIMQAVVDGKYKMCTSSLQIDGKKIFLLLCVDIPKKVVKLDESKTLYAFLGVMNPIVCTTDIKQKGDIDTDWKLWEIGTEAEFNYRRRQIQEAVKRCQVNNRYSRGGHGRFAKTKAIERWRAVERNYVDTKLHTYSKMLIDLAVKHKCGKIVLMNQLHREDAAKDDKFVLRNWSYHSLRTKIDYKAKMYGIKVEVEK

SEQ ID NO: 225 - protein, 483 aa, Artificial Sequence
  CasM.290380
MPVITRKIKLNLCTEGLSEDERKAQWKMLYRINDNLYRAANNISSKLYLDEHVSSMVRLKNAEYTSLVSDLMKAKKAEDEAAITDLEAKIESLKSEMTAQEEAICCYATEMATRTLAGKFASELDLDIYGQILAEVKSVVFKNFNSDSKEVREGNRSIRTYKKGMPIPFPWNKTIRLEAVKKELSGKHDEDEYDFYLNWYKSSRTDKKAIRFRLYFGKDKSNNQQIVKRCLHLDSTSSENYQMQTSSIQMKKGPEGAELYLLLVVNIPQEQHALNKKIVVGVDLGINVPAYVATNCTEERKAIGDRDHFLNTRMAFSRRFHSFQRLKGTSGGKGRKKKLEPLERLREKERNWVHTQNHLISRDVINFALQVKAATIQMEDLSGYGKDEEGNVKPENKFLQSKWSYFELQSMIKYKAAKCGIKVNLIAPAYTSQTCSWCGQMGIRESTSFVCQNPECKQYGKDIHADYNAARNIARSNKIVKNE

SEQ ID NO: 226 - protein, 477 aa, Artificial Sequence
  CasM.292901
MRISKTLSLRIVRPFYTPEVEAGIKAEKDKREAQGQTRSLDAKFFNELKKKHSEIILSSEFYSLLSEVQRQLTSIYNHAMSNLYHKIIVEGEKTSTSKALSNIGYDECKAIFPSYMALGLRQKIQSNFRRRDLKNFRMAVPTAKSDKFPIPIYRQVDGSKGGFKISENDGKDFIVELPLVDYVAEEVKTAKGRFTKINISKPPKIKNIPVILSTLRRRQSGQWFSDDGTNAEIRRVISGEYKVSWIEIVRRTRFGKHDDWFVNMVIKYDKPEEGLDSKVVGGIDVGVSSPLVCALNNSLDRYFVKSSDIIAFNKRAMARRRTLLRQNKYKRSGHGSKNKLEPITVLTEKNERFKKSIMQRWAKEVAEFFRGKGASVVRMEELSGLKEKDNFFSSYLRMYWNYGQLQQIIENKLKEYGIKVNYVSPKDTSKKCHSCTHINEFFTFEYRQKNNFPLFKCEKCGVECSADYNAAKNMAIA

SEQ ID NO: 227 - protein, 478 aa, Artificial Sequence
  CasM.293203
MEEKTKRLQKVAKFQIVKPVNMTWVELGKMLRDVRYRLWRLANMAVCENYMRFYQWRIGKTDANENHKVKILNRRLREMIIEEKQADAKELMRYSRDGVVSGYICGAFEKIHLSAIKNKSKWREVIRGKSNLPLFKRDLPIPINCSDHKPSLIAKTESDEYEVDLRICQKPYPRVLLSTAKISGGERAILERLVSNKTNSLPGYRHRFFEIKEKPKGRWNLHVTYDFARSEATMLHSDIIVGVDLGWSVPLYAAVNKGHARIGWRKLEPLAKRIRHLQKQVKARRLSVQKGGQRDLAAPTARAGHGRKRILQPIEKLEGKIDDAYKTLNHQLSHCVIEFAKNNGAGVIQVENLEGLKDTLTGTFIGQNWRYNQLQNYIEYKAKEAGMELKKVNPCQTSQRCSNCGFIHRDFTFEYRQANKKNGKAAMFECPECSKKENYKPLNADYNAARNLATAGIEGKIRLQCEKQGIEYKGLPEE

SEQ ID NO: 228 - protein, 453 aa, Artificial Sequence
  CasM.294190
MSKITRKIEIIPDIEGLTHDESNKKCYGAFYTFDKNLYKVANLLVSQLYGLDNLLSLMRLQNDEYVKCQSKLSLKSTTDAEKENLKKRMKKIDAELVSIKNGMAPKHPQTFAYRAVTNCVYAKNIPSDILNTLKQDVYKHFNDTKKEQFLGERSLTTYKRGMPVPFSIEKKHAIVCDGDNYYLPWFEDTRFRLNFGRDKSNNRAIIDNCIKTKRYKLCAAAKIQLKDKKLFLLVTVDIPATETTSVKGKVMGVDLGVVNPAYVAVNDGPERSRIGNGEAFQKQRDVFRRRFRELQRSQLTQGGHGRKHKTKATETLRGKERNWVQTENHRISREIVNLASRWKVECIQMESLKGYGKNQEGEVEDNHKRLLGRWSYFELQKDIEYKAAMVGIQVKYINPAYTSQTCHVCGQRGNRIERDTFICTNPECTCYNQAQDADMNAAINIAKSKDVVK

SEQ ID NO: 229 - protein, 469 aa, Artificial Sequence
  CasM.294406
MPTITRKIEMKLCTEGLSDQERKDQWNLLYHINDNLYRAANNISSKLYLDDHVLSMVRLKHAEYLGLLRALEKAKKQKIPDEEVIAELSQKVAAAEQEMDDQAKAICQYATEMSTQSLSYRFATELETGIFTKILDCLKQGVFATFNSDTRDVKRGERSIRTYKKGMPIPFAWNDSLRIELEDGEFYLRWYNGLRFRFDFGKDRSNNRLIVRRCLNMDEDYEGDYKLCNSSIQMVKREGLAKFFLLMVVNIPQEQVELNKKIVVGVDLGINAPAYVATNITSERKQIGDREHFLNERMAFQRRFKSLQRLKGTTGGRGRAKKLEPLERLRKAEQNWVHTQNHLFSREVIDFAVKSRAATIHMEDLSGFGKDRDGNADDKKEFVLRNWSYYELQSMITYKAAKYGIKVEKIRPAYTSKTCSWCGHQGFREGITFICENPECKKYGEKEHADYNAARNIANSIEIVKNNEE

SEQ ID NO: 230 - protein, 478 aa, Artificial Sequence
  CasM.294601
MKDYIRKTLSLRILRPYYGEEIEKEIAAAKKKSQAEGGDGALDNKFWDRLKAEHPEIISSREFYDLLDAIQRETTLYYNRAISKLYHSLIVEREQVSTAKALSAGPYHEFREKFNAYISLGLREKIQSNFRRKELARYQVALPTAKSDTFPIPIYKGFDKNGKGGFKVREIENGDFVIDLPLMAYHRVGGKAGREYIELDRPPAVLNVPVILSTSRRRANKTWFRDEGTDAEIRRVMAGEYKVSWVEILQRKRFGKPYGGWYVNFTIKYQPRDYGLDPKVKGGIDIGLSSPLVCAVTNSLARLTIRDNDLVAFNRKAMARRRTLLRQNRYKRSGHGSANKLKPIEALTEKNELYRKAIMRRWAREAADFFRQHRAATVNMEDLTGIKDREDYFSQMLRCYWNYSQLQTMLENKLKEYGIAVKYIEPKDTSKTCHSCGHVNEYFDFNYRSAHKFPMFKCEKCGVECGADYNAARNIAQA

SEQ ID NO: 231 - protein, 480 aa, Artificial Sequence
  CasM.294655
MPFKVLKLKIIKPVNMDWNELGQSIRDTRYRVYRLANLAVSEAYLAFHLWRAGKTDAIPKATAGQLNRRLRDMLLEEARTKAVKDRKNTGEKGTEDDAKKAQKEMNKFSKTGALPDTVAGALFMYKVKGLISKGKWTQVIRGKSALPTFRNNMAIPIRCDKKTQRRLERTENGVELELMIRNKPYPRVLLGTQGIGEGAEAIIERLLSNESQAEQGYKQRYFEVREDVNRTWWLYVCYALPASTPPRLDPSKIVGVDLGFTCPMYAAISNGHARLGYRAFSSLAARVKALKLRTMRRRREIQRGGRTIVSGEAARSGHGRKRKLLGIEKLQGRVNQAYTTLNHQMSAAVVKFAIENGAGTIQVENLEGLREELSGTFLGQMWRYFQLQEFLQYKAEENGIVIRKVNPRYTSRRCSQCGHINKEFTRKARDRNAEGGYSAKFKCPDCEYEADADYNAAKNLAVDGIEGIIEKQCGSQGIVL

SEQ ID NO: 232 - protein, 494 aa, Artificial Sequence
  CasM.295201
MFLYKELKTMAKTNAEEGKIENKEKRLTKVAKFQIVKPVNMTWPEFGKMLGDVRYRLSRVANMAVTEKYLESQQKRTGQKIQRENTLVTIANRKLREMLKKEKVKEEELDRYSRDGAVSGYVTGPFEHNKLSAISKRFKEVLKGNMSLPNFKREMAIPINCSNAKLSTIEKTETGEYVVDLRISQKPWPRVLLSTNRISNGQREILERLAANKTFSDDGYKHLFFEVKQQGKDWFLSVTYSFPKSEAPKLHKDIIVGVDLGWSVPLYAAVNKGYARIGWQKFRPLAERIKHLQKQVKARRITIQKGGQQDLATPTARTGHGRKRILRPIEKLERKIENAYTTLNHQLSHCVIEFAKNNGAGVIQIENLSGLANELSGTYIGQNWRYEQLQEYIRYKAEEAGIEVKHVNPCRTSQRCSECGFINDKFNFEYRQANRNNGMSAMFECPECKKNKKDYKPINADYNAAKNLTTANIDEIIRLQCKKQGIEYKELPKD

SEQ ID NO: 233 - protein, 453 aa, Artificial Sequence
  CasM.296640
MSKITRKIELIPDIENLTHEESNQRCYKVFYNIDNKLYKVANLLVCQLFGLDNLLSLMRLQNDEYVKCQSKLASKSISEETKRDIKKRMEAIDKELLARKDEIAPKHPQTFAYRAIKDSDYAKDLPSDIFNTLKQDVFKHFNETKKEQLRGERSLTTYKRGIPVPFNLMKKNVIVSDGDNYYLTWFEETRFKLNFGKDRSNNRAIIDNCLKTNKYKLCTAAKIQLKNKKLFLLVTVDIPETKNKIIKGKVMGVDLGVVHPAYVAVNDGPERSLIGDGDAFQKQRDVFRRRFRELQRCQLTQGGHGRKHKTKATENLRGKERNWVQTENHRISREIVNLAIRWRVETIQMENLKGFGKDSDGDVETKHQRLLGRWSYFELQKDIEYKAAMAGIKVVYVNPAYTSQTCHVCGERGDRTERDTFICTNTECDCYGKPQDADMNAAINIARSKNIVK

SEQ ID NO: 234 - protein, 427 aa, Artificial Sequence
  CasM.296642
MTKVVKLPLICEQSDKDGNPIDYKKIYEILFELQRQTREIKNKSIQYCWEFSNFSSDYYKQNHEYPKEKDILSYTLVGFVNDKFKTGNDLYSGNCSTTVRGACGEFKNSKTDFLKGTKSIINYKGNQPLDLHNKTIRFECIGKDYYAYLKLLNRPAFQRNNFSSSEIKFKVLVYDNSSKTIVERCIDNIYKISASKLIYNEKKKCWVLNLSYSFTNNNVCELDENKILGVDLGIHYPICASVNGERKFFKIDGGEIDHTRRKIEVRKKSLLKQGSSCGEGRIGHGIKTRNKPVYNIEDKIACFRDTANHKYSRALINYAVNNNCGIIQMEKLTGITADSDRFLKNWSYFDLQTKIEYKAKEAGITVVYIDPQYTSQRCSKCGYISKENRKVQAKFCCQKCGYEANADYNASQNIGIKDIDKIIKNTK

SEQ ID NO: 235 - protein, 472 aa, Artificial Sequence
  CasM.298142
VPITKTISLRILRPYYPPEIEAKIKAEKEKRKENGDTGSLNSSYYRELKKEYPSIIINDEFFPLLSEMQRNITSIYNRTISHLYHRLIIKKESISTAKALSEGPYRDFKSTFNSYIALGLRQKVQSNFRKKDLMAFKIALPTAKSDKFPIPIYMQTNFKIKESPDSDFIIELPLVEYIAKETKGKNKMFTKVEILSPPKVKNIPVILSTRRRKESGQWFSDEGTNAEIRRIISGEYKVSWIEIVKRTRFGKHDWFVNMVISFEESQEGLDPDVIGGIDIGVSKPLICAINNSLDRYIVKGDDIIAFNRRALSRRRSLLRRNRLKRSGHGSRNKLEPITVLTEKNERFKKSIMQRWAKEVAEFFKSKRASIVQMEELTGIKEREDFFSKTLRMYWNYGQLQKTVENKLREYGIEVRYASPKDTSRRCHSCGHINDYFTFEFRQQNNFPLFKCMNCGIECSADYNAARNIAIAR

SEQ ID NO: 236 - protein, 1331 aa, Artificial Sequence
  CasM.298248
MNRIYQGRVSKVEIPDGKDEWKKLDDGESALWQHHQLFQDDVNYLLAAFAALVPTSCEDDIWKDYQAAIERSWESYTGRQGIWDRPFENACVIVGCKKDASFKEFRRKLNSLTGSKASEKQKFEALKQLFEPATEAAKKLKKHDEPVEESLKGKAKDLFGSTLVNLCAQKTKVTPRDVIAKQRNRASECTKKVNEGERLKWADVFYFKTDTSAAKWSREDAAKNIIQFLDKLLGEVEEKEKDAKTSDQKKKMADLAERLEKQKKPLAAWCNNSKTDLPTTEPTRKGSGGYDLKAAVLFSLQPDLDGFRDAFLLFNQARLKEEFATTEKGDAAYIARMAGGVARPVFPFFCDVWAGKVNDEKIGQGIWPDFEKQAFSEVFTKIGQFIVRGRKFELRLAIADQIIAKIETQKKSDARLQAVERIAEDLADELPDTAVDENGQKRPYGIRERTLKGWRKVRPAWREALKKTPNLTAEDLIKQKNRMQERQREKYGSASLFDRLAKEPEIWNHDDKEDAVETWADYVENLEEKAHLETERLFAPAHATLSPRFFRWSETNNKEHLEASSPDVPFELKADALDLSKKEKSQIKIHFWSPRLWRDGLRGKKENLDKDEPDQNWMPPVLRAFVKARKWPCDKQSFAGASVRLAPRCKENIQLVFEPELHTEILSAKWKENFPFSPAKNKESESVGLFWPRTKEDKVLWFDKGETRCLGVDLGLTNSAAWQILQATNKDATAKAPRLRHRLNPDSEKAAWFAHSITNGIVRVAGEDCWGWRKFAPDEKAKLRAELKKPAGKRNALCRKFLSLNREIEFETATHSFLPELSGSGGRNPTDDETKEAAEFFSTLKTKGFDITDRQPSWGKNLSFPKQNDELLWGLKRVRAQLFRLNRWSEQLGKERDSKPYQSAIEIIGNLRSDDPLIELATLKSEPKRLKSRIAELAGEYLDCFKTLLPRIADRILPWRRGHWSWKPCDNDWHRMELDASKPRPEALLAGQRGISLPRLNQLKDLRQLAQSLNHLCRRKQIKRNETVPEPFEDCRQAMEDAREDRAKKIAHEVFAIALGVELAPPPPDKQERKQTESLHGVYRCLERGPVNFIALENLGGYNPSAKQGRRENRQLSSWLKGRIHKILGELCEMVGMPIVLVNAEYTSRFSAKDHSPGFRAEEVQTDDSRRSFWQRKAKEEPSGWQNEFLCWLNKVPDGKSLLLPKKGGEFFVPLGEGTSLYHADLNAAYRIALRALAHRDRAELLGQTWIEKKPYLVDVAGVFPDSILRNGCAFKTISSSERLWEKVNGDLAMQRCREINLARFASWKIALPQQIISEALPPDEEDDIPM

SEQ ID NO: 237 - protein, 517 aa, Artificial Sequence
  CasM.298264
MSEATKTLAYRYRLRLTPAQEDILDRSQEQLRLVWNHLVRSQHKVEHEWRHGRAASIKNELLELSLAKNATGQAIPSARKITEERGVSMEEALRLMRQKFVEKVSAIPLRKKDGSRCLRIARRKMATEYAVTVVNAKFKHYYGLGARMCKVLRDKFQKCSDMWIKGKFRRPRFKRKGESVALQRQVQSNSPFKLKRFSDLSALGGQALKKCEVIIHRPLPDSAEIKQIAVSGRRGQRHLIVMFKAASSDVAKNFPATNRTAGVDPGIKVALTITPLDSPDFGTSDKIEKQPDLARDACFLKRLRRLQRKHDRQRRQNNPECFDEKGRWIKGKRLHNESKNMQRTQSRITAMNTHLAESRRDFYHNAACEILRSFDNVAVGKWRPAQTRQRKPTTPSPKGLGAARRATNRISYDHAISLFISYLKDKAERSVTTKHVQEVSEFGSTRSCPKCGKLTGPVGTEGLAVRDWTCVNCNTTFQRDAASAWQIAKRFKAEVASTSQPAESQDSANSASVLTQV

SEQ ID NO: 238 - protein, 470 aa, Artificial Sequence
  CasM.298446
MPTLTRKVELYVVGDKEEVSRVYDYIRLAMNATYKCFNECMTALYIAQVKEDTKEDRKELNHLYSRQTYTKKETAFTNDIVFPEGLALAAYVNRMAQQKFVTSLKNGLMYGCVSLPTFKKDCAVPLHVKFVSLAGEKGTNTGFYHEYADVNDLVNALEYDNSPKVFLRFPNNITFGVVFGNPYRGREQRSVFSKIFLGEYKIQGSSIQINSRGKIILNLSMEVPKKKMEHIEGRVVGVDVGLAIPAMCAINDDDYTRSAIGNIDDFLKVRTQIQSQRRRLQKSLKNTSSGHGRTKKLKPLERIAEKERNFANTYNHMVSKRVVDFAVKNGASQINIEDLSGFAKDKNGKSVEDDNMKRVLSNWSYFELQQQIRYKAEQYDIKVRTVNPAYTSQTCSYCGQIGKRETQSKFVCTNPDCKCHKMYKKDWFNADFNAARNIALSTDYTDDEDGKKTKKKKSAKKKPEKKTEEA

SEQ ID NO: 239 - protein, 500 aa, Artificial Sequence
  CasM.298612
MSGASGQITRDNKAQRSGPNKGEMSEDHSSTKRPKRVVKVAKYRIIKPVGEMTWPELGEILRTVRYRVFRLGNLAVSEAYLNFHAFRTGKAEEFKSETIGKLSRRLRDMLISEGVKKEDIDRYSATGAVPDTVAGALGQYKVRGITSPAKWRQVIRGTVSLPTFRNDMAIPVRCDKPAQRRLEKAKSEEVEVDLMICRKPYPRVLIGTADLGGGQQAILERLLDNKDNSSDGYRQRLFEIKQDTQSKKWFLFVTYDFPSSGALPLDPNVAVGVDLGVSVPLYAAINNGHARLGRRQFQALGSRIRSLQTQVDARRRAIQRGGRSDVSQSTARSGHGVRRKLQPTEKLRKRIDRSYSTLNHQLSAAVVEFAKNQGAGTVQMEDLGGLREELTGTFIGARWRYHQLQQFLEYKCDEAGITLNKVNPMYTSRRCSECGFIDKDFDRAFRDRSRSDGRVARFICPECSYEADPDYNAARNIATLDIDKLIRVQCQKQGLKYDAL

SEQ ID NO: 240 - protein, 459 aa, Artificial Sequence
  CasM.299584
MIITRKIELWLSEDDNELRKAKWSYLKELNDEVYRAANFIVNNQYFNEILENRVIMQDTRLIDIDSEIRKLYKSREKNKEKIDELKKIKKIRYQEAKNFYQTSKQNVTYQLTSREFPNIPANIVTSLNASIIKTLKTEWNEIKSGKRAVRNYRKGMPIPFNFSSSQKWFENKGEDIFLNWLGGLKFKLFFGRDKSNNRAIVERAINKEYKYADSSIQLKDKKIFLLFVVDIPYEKANLNKNIAAGVDLGIAFPAFCALSEGYSRLSIGNKEDLLKVRLQMQSRRKRLQKALKITSGGKGRTKKLKALESLTNKEKNYVTTYNHKVSYQVIKFAKDNKAGIIKLEFLEGFGEDEKNKFILRNWSFYQLQKMIEYKAKREGIEVLYIDPYHTSQTCAICGNYEEGQREKQEDFICKNPECKNFEKIVNADYNAALNIAKSNKIVSSSEQCEYNKKHENNVL

SEQ ID NO: 241 - protein, 468 aa, Artificial Sequence
  Variant of CasM.19952
MPTITRKIELTLLTEGLSEEQRKEQWGLLYHINDNLYKAANNISSKLYLDDHVSSMVRMKHAEYLSLLKELARAEKQKTPDADAIAELRKKVAAAEKEMTDQEHAICKYRTEMSTQSLSYRFATELETNIFAKILDCLKQGVFATFNSDARDVKRGERAIRNYKKGMPIPFAWDKSLRIEKDNKDFYLRWYNGLRFLFNFGKDRSNNRLIVERCLKMDADYDGEYKLCNSSIQIAKREGKTKLFLLLVVKIPQEHVELNKKVVVGVDLGINVPAYVATNITEERKAIGDREHFLNSRMAFQRRYKSLQRLRGTAGGKGRAKKLEPLERLRKAEHNWVHTQNHLFSREVVDFAVKSHAATIHMEDLSGFGKDNDGNADERKEFVLRNWSYYELQNMIAYKAAKYGIKVEKIHPAYTSKTCSWCGQLGFREGVTFICENPECKQCGEKVHADYNAARNIANSKDIIKKNE

SEQ ID NO: 242 - protein, 468 aa, Artificial Sequence
  Variant of CasM.19952
MPTITRKIELTLLTEGLSEEQRKEQWGLLYHINDNLYKAANNISSKLYLDDHVSSMVRMKHAEYLSLLKELARAEKQKTPDADAIAELRKKVAAAEKEMTDQEHAICKYAREMSTQSLSYRFATELETNIFAKILDCLKQGVFATFNSDARDVKRGERAIRNYKKGMPIPFAWDKSLRIEKDNKDFYLRWYNGLRFLFNFGKDRSNNRLIVERCLKMDADYDGEYKLCNSSIQIAKREGKTKLFLLLVVKIPQEHVELNKKVVVGVDLGINVPAYVATNITEERKAIGDREHFLNSRMAFQRRYKSLQRLRGTAGGKGRAKKLEPLERLRKAEHNWVHTQNHLFSREVVDFAVKSHAATIHMEDLSGFGKDNDGNADERKEFVLRNWSYYELQNMIAYKAAKYGIKVEKIHPAYTSKTCSWCGQLGFREGVTFICENPECKQCGEKVHADYNAARNIANSKDIIKKNE

SEQ ID NO: 243 - protein, 468 aa, Artificial Sequence
  Variant  of CasM.19952
MPTITRKIELTLLTEGLSEEQRKEQWGLLYHINDNLYKAANNISSKLYLDDHVSSMVRMKHAEYLSLLKELARAEKQKTPDADAIAELRKKVAAAEKEMTDQEHAICKYATRMSTQSLSYRFATELETNIFAKILDCLKQGVFATFNSDARDVKRGERAIRNYKKGMPIPFAWDKSLRIEKDNKDFYLRWYNGLRFLFNFGKDRSNNRLIVERCLKMDADYDGEYKLCNSSIQIAKREGKTKLFLLLVVKIPQEHVELNKKVVVGVDLGINVPAYVATNITEERKAIGDREHFLNSRMAFQRRYKSLQRLRGTAGGKGRAKKLEPLERLRKAEHNWVHTQNHLFSREVVDFAVKSHAATIHMEDLSGFGKDNDGNADERKEFVLRNWSYYELQNMIAYKAAKYGIKVEKIHPAYTSKTCSWCGQLGFREGVTFICENPECKQCGEKVHADYNAARNIANSKDIIKKNE

SEQ ID NO: 244 - protein, 468 aa, Artificial Sequence
  Variants of CasM.19952
MPTITRKIELTLLTEGLSEEQRKEQWGLLYHINDNLYKAANNISSKLYLDDHVSSMVRMKHAEYLSLLKELARAEKQKTPDADAIAELRKKVAAAEKEMTDQEHAICKYATERSTQSLSYRFATELETNIFAKILDCLKQGVFATFNSDARDVKRGERAIRNYKKGMPIPFAWDKSLRIEKDNKDFYLRWYNGLRFLFNFGKDRSNNRLIVERCLKMDADYDGEYKLCNSSIQIAKREGKTKLFLLLVVKIPQEHVELNKKVVVGVDLGINVPAYVATNITEERKAIGDREHFLNSRMAFQRRYKSLQRLRGTAGGKGRAKKLEPLERLRKAEHNWVHTQNHLFSREVVDFAVKSHAATIHMEDLSGFGKDNDGNADERKEFVLRNWSYYELQNMIAYKAAKYGIKVEKIHPAYTSKTCSWCGQLGFREGVTFICENPECKQCGEKVHADYNAARNIANSKDIIKKNE

SEQ ID NO: 245 - protein, 468 aa, Artificial Sequence
  Variants of CasM.19952
MPTITRKIELTLLTEGLSEEQRKEQWGLLYHINDNLYKAANNISSKLYLDDHVSSMVRMKHAEYLSLLKELARAEKQKTPDADAIAELRKKVAAAEKEMTDQEHAICKYATEMRTQSLSYRFATELETNIFAKILDCLKQGVFATFNSDARDVKRGERAIRNYKKGMPIPFAWDKSLRIEKDNKDFYLRWYNGLRFLFNFGKDRSNNRLIVERCLKMDADYDGEYKLCNSSIQIAKREGKTKLFLLLVVKIPQEHVELNKKVVVGVDLGINVPAYVATNITEERKAIGDREHFLNSRMAFQRRYKSLQRLRGTAGGKGRAKKLEPLERLRKAEHNWVHTQNHLFSREVVDFAVKSHAATIHMEDLSGFGKDNDGNADERKEFVLRNWSYYELQNMIAYKAAKYGIKVEKIHPAYTSKTCSWCGQLGFREGVTFICENPECKQCGEKVHADYNAARNIANSKDIIKKNE

SEQ ID NO: 246 - protein, 468 aa, Artificial Sequence
  Variants of CasM.19952
MPTITRKIELTLLTEGLSEEQRKEQWGLLYHINDNLYKAANNISSKLYLDDHVSSMVRMKHAEYLSLLKELARAEKQKTPDADAIAELRKKVAAAEKEMTDQEHAICKYATEMSRQSLSYRFATELETNIFAKILDCLKQGVFATFNSDARDVKRGERAIRNYKKGMPIPFAWDKSLRIEKDNKDFYLRWYNGLRFLFNFGKDRSNNRLIVERCLKMDADYDGEYKLCNSSIQIAKREGKTKLFLLLVVKIPQEHVELNKKVVVGVDLGINVPAYVATNITEERKAIGDREHFLNSRMAFQRRYKSLQRLRGTAGGKGRAKKLEPLERLRKAEHNWVHTQNHLFSREVVDFAVKSHAATIHMEDLSGFGKDNDGNADERKEFVLRNWSYYELQNMIAYKAAKYGIKVEKIHPAYTSKTCSWCGQLGFREGVTFICENPECKQCGEKVHADYNAARNIANSKDIIKKNE

SEQ ID NO: 247 - protein, 468 aa, Artificial Sequence
  Variants of CasM.19952
MPTITRKIELTLLTEGLSEEQRKEQWGLLYHINDNLYKAANNISSKLYLDDHVSSMVRMKHAEYLSLLKELARAEKQKTPDADAIAELRKKVAAAEKEMTDQEHAICKYATEMSTRSLSYRFATELETNIFAKILDCLKQGVFATFNSDARDVKRGERAIRNYKKGMPIPFAWDKSLRIEKDNKDFYLRWYNGLRFLFNFGKDRSNNRLIVERCLKMDADYDGEYKLCNSSIQIAKREGKTKLFLLLVVKIPQEHVELNKKVVVGVDLGINVPAYVATNITEERKAIGDREHFLNSRMAFQRRYKSLQRLRGTAGGKGRAKKLEPLERLRKAEHNWVHTQNHLFSREVVDFAVKSHAATIHMEDLSGFGKDNDGNADERKEFVLRNWSYYELQNMIAYKAAKYGIKVEKIHPAYTSKTCSWCGQLGFREGVTFICENPECKQCGEKVHADYNAARNIANSKDIIKKNE

SEQ ID NO: 248 - protein, 468 aa, Artificial Sequence
  Variants of CasM.19952
MPTITRKIELTLLTEGLSEEQRKEQWGLLYHINDNLYKAANNISSKLYLDDHVSSMVRMKHAEYLSLLKELARAEKQKTPDADAIAELRKKVAAAEKEMTDQEHAICKYATEMSTQRLSYRFATELETNIFAKILDCLKQGVFATFNSDARDVKRGERAIRNYKKGMPIPFAWDKSLRIEKDNKDFYLRWYNGLRFLFNFGKDRSNNRLIVERCLKMDADYDGEYKLCNSSIQIAKREGKTKLFLLLVVKIPQEHVELNKKVVVGVDLGINVPAYVATNITEERKAIGDREHFLNSRMAFQRRYKSLQRLRGTAGGKGRAKKLEPLERLRKAEHNWVHTQNHLFSREVVDFAVKSHAATIHMEDLSGFGKDNDGNADERKEFVLRNWSYYELQNMIAYKAAKYGIKVEKIHPAYTSKTCSWCGQLGFREGVTFICENPECKQCGEKVHADYNAARNIANSKDIIKKNE

SEQ ID NO: 249 - protein, 468 aa, Artificial Sequence
  Variants of CasM.19952
MPTITRKIELTLLTEGLSEEQRKEQWGLLYHINDNLYKAANNISSKLYLDDHVSSMVRMKHAEYLSLLKELARAEKQKTPDADAIAELRKKVAAAEKEMTDQEHAICKYATEMSTQSRSYRFATELETNIFAKILDCLKQGVFATFNSDARDVKRGERAIRNYKKGMPIPFAWDKSLRIEKDNKDFYLRWYNGLRFLFNFGKDRSNNRLIVERCLKMDADYDGEYKLCNSSIQIAKREGKTKLFLLLVVKIPQEHVELNKKVVVGVDLGINVPAYVATNITEERKAIGDREHFLNSRMAFQRRYKSLQRLRGTAGGKGRAKKLEPLERLRKAEHNWVHTQNHLFSREVVDFAVKSHAATIHMEDLSGFGKDNDGNADERKEFVLRNWSYYELQNMIAYKAAKYGIKVEKIHPAYTSKTCSWCGQLGFREGVTFICENPECKQCGEKVHADYNAARNIANSKDIIKKNE

SEQ ID NO: 250 - protein, 468 aa, Artificial Sequence
  Variants of CasM.19952
MPTITRKIELTLLTEGLSEEQRKEQWGLLYHINDNLYKAANNISSKLYLDDHVSSMVRMKHAEYLSLLKELARAEKQKTPDADAIAELRKKVAAAEKEMTDQEHAICKYATEMSTQSLRYRFATELETNIFAKILDCLKQGVFATFNSDARDVKRGERAIRNYKKGMPIPFAWDKSLRIEKDNKDFYLRWYNGLRFLFNFGKDRSNNRLIVERCLKMDADYDGEYKLCNSSIQIAKREGKTKLFLLLVVKIPQEHVELNKKVVVGVDLGINVPAYVATNITEERKAIGDREHFLNSRMAFQRRYKSLQRLRGTAGGKGRAKKLEPLERLRKAEHNWVHTQNHLFSREVVDFAVKSHAATIHMEDLSGFGKDNDGNADERKEFVLRNWSYYELQNMIAYKAAKYGIKVEKIHPAYTSKTCSWCGQLGFREGVTFICENPECKQCGEKVHADYNAARNIANSKDIIKKNE

SEQ ID NO: 251 - protein, 468 aa, Artificial Sequence
  Variants of CasM.19952
MPTITRKIELTLLTEGLSEEQRKEQWGLLYHINDNLYKAANNISSKLYLDDHVSSMVRMKHAEYLSLLKELARAEKQKTPDADAIAELRKKVAAAEKEMTDQEHAICKYATEMSTQSLSYRRATELETNIFAKILDCLKQGVFATFNSDARDVKRGERAIRNYKKGMPIPFAWDKSLRIEKDNKDFYLRWYNGLRFLFNFGKDRSNNRLIVERCLKMDADYDGEYKLCNSSIQIAKREGKTKLFLLLVVKIPQEHVELNKKVVVGVDLGINVPAYVATNITEERKAIGDREHFLNSRMAFQRRYKSLQRLRGTAGGKGRAKKLEPLERLRKAEHNWVHTQNHLFSREVVDFAVKSHAATIHMEDLSGFGKDNDGNADERKEFVLRNWSYYELQNMIAYKAAKYGIKVEKIHPAYTSKTCSWCGQLGFREGVTFICENPECKQCGEKVHADYNAARNIANSKDIIKKNE

SEQ ID NO: 252 - protein, 468 aa, Artificial Sequence
  Variants of CasM.19952
MPTITRKIELTLLTEGLSEEQRKEQWGLLYHINDNLYKAANNISSKLYLDDHVSSMVRMKHAEYLSLLKELARAEKQKTPDADAIAELRKKVAAAEKEMTDQEHAICKYATEMSTQSLSYRFRTELETNIFAKILDCLKQGVFATFNSDARDVKRGERAIRNYKKGMPIPFAWDKSLRIEKDNKDFYLRWYNGLRFLFNFGKDRSNNRLIVERCLKMDADYDGEYKLCNSSIQIAKREGKTKLFLLLVVKIPQEHVELNKKVVVGVDLGINVPAYVATNITEERKAIGDREHFLNSRMAFQRRYKSLQRLRGTAGGKGRAKKLEPLERLRKAEHNWVHTQNHLFSREVVDFAVKSHAATIHMEDLSGFGKDNDGNADERKEFVLRNWSYYELQNMIAYKAAKYGIKVEKIHPAYTSKTCSWCGQLGFREGVTFICENPECKQCGEKVHADYNAARNIANSKDIIKKNE

SEQ ID NO: 253 - protein, 468 aa, Artificial Sequence
  Variants of CasM.19952
MPTITRKIELTLLTEGLSEEQRKEQWGLLYHINDNLYKAANNISSKLYLDDHVSSMVRMKHAEYLSLLKELARAEKQKTPDADAIAELRKKVAAAEKEMTDQEHAICKYATEMSTQSLSYRFARELETNIFAKILDCLKQGVFATFNSDARDVKRGERAIRNYKKGMPIPFAWDKSLRIEKDNKDFYLRWYNGLRFLFNFGKDRSNNRLIVERCLKMDADYDGEYKLCNSSIQIAKREGKTKLFLLLVVKIPQEHVELNKKVVVGVDLGINVPAYVATNITEERKAIGDREHFLNSRMAFQRRYKSLQRLRGTAGGKGRAKKLEPLERLRKAEHNWVHTQNHLFSREVVDFAVKSHAATIHMEDLSGFGKDNDGNADERKEFVLRNWSYYELQNMIAYKAAKYGIKVEKIHPAYTSKTCSWCGQLGFREGVTFICENPECKQCGEKVHADYNAARNIANSKDIIKKNE

SEQ ID NO: 254 - protein, 468 aa, Artificial Sequence
  Variants of CasM.19952
MPTITRKIELTLLTEGLSEEQRKEQWGLLYHINDNLYKAANNISSKLYLDDHVSSMVRMKHAEYLSLLKELARAEKQKTPDADAIAELRKKVAAAEKEMTDQEHAICKYATEMSTQSLSYRFATRLETNIFAKILDCLKQGVFATFNSDARDVKRGERAIRNYKKGMPIPFAWDKSLRIEKDNKDFYLRWYNGLRFLFNFGKDRSNNRLIVERCLKMDADYDGEYKLCNSSIQIAKREGKTKLFLLLVVKIPQEHVELNKKVVVGVDLGINVPAYVATNITEERKAIGDREHFLNSRMAFQRRYKSLQRLRGTAGGKGRAKKLEPLERLRKAEHNWVHTQNHLFSREVVDFAVKSHAATIHMEDLSGFGKDNDGNADERKEFVLRNWSYYELQNMIAYKAAKYGIKVEKIHPAYTSKTCSWCGQLGFREGVTFICENPECKQCGEKVHADYNAARNIANSKDIIKKNE

SEQ ID NO: 255 - protein, 468 aa, Artificial Sequence
  Variants of CasM.19952
MPTITRKIELTLLTEGLSEEQRKEQWGLLYHINDNLYKAANNISSKLYLDDHVSSMVRMKHAEYLSLLKELARAEKQKTPDADAIAELRKKVAAAEKEMTDQEHAICKYATEMSTQSLSYRFATERETNIFAKILDCLKQGVFATFNSDARDVKRGERAIRNYKKGMPIPFAWDKSLRIEKDNKDFYLRWYNGLRFLFNFGKDRSNNRLIVERCLKMDADYDGEYKLCNSSIQIAKREGKTKLFLLLVVKIPQEHVELNKKVVVGVDLGINVPAYVATNITEERKAIGDREHFLNSRMAFQRRYKSLQRLRGTAGGKGRAKKLEPLERLRKAEHNWVHTQNHLFSREVVDFAVKSHAATIHMEDLSGFGKDNDGNADERKEFVLRNWSYYELQNMIAYKAAKYGIKVEKIHPAYTSKTCSWCGQLGFREGVTFICENPECKQCGEKVHADYNAARNIANSKDIIKKNE

SEQ ID NO: 256 - protein, 468 aa, Artificial Sequence
  Variants of CasM.19952
MPTITRKIELTLLTEGLSEEQRKEQWGLLYHINDNLYKAANNISSKLYLDDHVSSMVRMKHAEYLSLLKELARAEKQKTPDADAIAELRKKVAAAEKEMTDQEHAICKYATEMSTQSLSYRFATELRTNIFAKILDCLKQGVFATFNSDARDVKRGERAIRNYKKGMPIPFAWDKSLRIEKDNKDFYLRWYNGLRFLFNFGKDRSNNRLIVERCLKMDADYDGEYKLCNSSIQIAKREGKTKLFLLLVVKIPQEHVELNKKVVVGVDLGINVPAYVATNITEERKAIGDREHFLNSRMAFQRRYKSLQRLRGTAGGKGRAKKLEPLERLRKAEHNWVHTQNHLFSREVVDFAVKSHAATIHMEDLSGFGKDNDGNADERKEFVLRNWSYYELQNMIAYKAAKYGIKVEKIHPAYTSKTCSWCGQLGFREGVTFICENPECKQCGEKVHADYNAARNIANSKDIIKKNE

SEQ ID NO: 257 - protein, 468 aa, Artificial Sequence
  Variants of CasM.19952
MPTITRKIELTLLTEGLSEEQRKEQWGLLYHINDNLYKAANNISSKLYLDDHVSSMVRMKHAEYLSLLKELARAEKQKTPDADAIAELRKKVAAAEKEMTDQEHAICKYATEMSTQSLSYRFATELERNIFAKILDCLKQGVFATFNSDARDVKRGERAIRNYKKGMPIPFAWDKSLRIEKDNKDFYLRWYNGLRFLFNFGKDRSNNRLIVERCLKMDADYDGEYKLCNSSIQIAKREGKTKLFLLLVVKIPQEHVELNKKVVVGVDLGINVPAYVATNITEERKAIGDREHFLNSRMAFQRRYKSLQRLRGTAGGKGRAKKLEPLERLRKAEHNWVHTQNHLFSREVVDFAVKSHAATIHMEDLSGFGKDNDGNADERKEFVLRNWSYYELQNMIAYKAAKYGIKVEKIHPAYTSKTCSWCGQLGFREGVTFICENPECKQCGEKVHADYNAARNIANSKDIIKKNE

SEQ ID NO: 258 - protein, 468 aa, Artificial Sequence
  Variants of CasM.19952
MPTITRKIELTLLTEGLSEEQRKEQWGLLYHINDNLYKAANNISSKLYLDDHVSSMVRMKHAEYLSLLKELARAEKQKTPDADAIAELRKKVAAAEKEMTDQEHAICKYATEMSTQSLSYRFATELETRIFAKILDCLKQGVFATFNSDARDVKRGERAIRNYKKGMPIPFAWDKSLRIEKDNKDFYLRWYNGLRFLFNFGKDRSNNRLIVERCLKMDADYDGEYKLCNSSIQIAKREGKTKLFLLLVVKIPQEHVELNKKVVVGVDLGINVPAYVATNITEERKAIGDREHFLNSRMAFQRRYKSLQRLRGTAGGKGRAKKLEPLERLRKAEHNWVHTQNHLFSREVVDFAVKSHAATIHMEDLSGFGKDNDGNADERKEFVLRNWSYYELQNMIAYKAAKYGIKVEKIHPAYTSKTCSWCGQLGFREGVTFICENPECKQCGEKVHADYNAARNIANSKDIIKKNE

SEQ ID NO: 259 - protein, 468 aa, Artificial Sequence
  Variants of CasM.19952
MPTITRKIELTLLTEGLSEEQRKEQWGLLYHINDNLYKAANNISSKLYLDDHVSSMVRMKHAEYLSLLKELARAEKQKTPDADAIAELRKKVAAAEKEMTDQEHAICKYATEMSTQSLSYRFATELETNRFAKILDCLKQGVFATFNSDARDVKRGERAIRNYKKGMPIPFAWDKSLRIEKDNKDFYLRWYNGLRFLFNFGKDRSNNRLIVERCLKMDADYDGEYKLCNSSIQIAKREGKTKLFLLLVVKIPQEHVELNKKVVVGVDLGINVPAYVATNITEERKAIGDREHFLNSRMAFQRRYKSLQRLRGTAGGKGRAKKLEPLERLRKAEHNWVHTQNHLFSREVVDFAVKSHAATIHMEDLSGFGKDNDGNADERKEFVLRNWSYYELQNMIAYKAAKYGIKVEKIHPAYTSKTCSWCGQLGFREGVTFICENPECKQCGEKVHADYNAARNIANSKDIIKKNE

SEQ ID NO: 260 - protein, 468 aa, Artificial Sequence
  Variants of CasM.19952
MPTITRKIELTLLTEGLSEEQRKEQWGLLYHINDNLYKAANNISSKLYLDDHVSSMVRMKHAEYLSLLKELARAEKQKTPDADAIAELRKKVAAAEKEMTDQEHAICKYATEMSTQSLSYRFATELETNIRAKILDCLKQGVFATFNSDARDVKRGERAIRNYKKGMPIPFAWDKSLRIEKDNKDFYLRWYNGLRFLFNFGKDRSNNRLIVERCLKMDADYDGEYKLCNSSIQIAKREGKTKLFLLLVVKIPQEHVELNKKVVVGVDLGINVPAYVATNITEERKAIGDREHFLNSRMAFQRRYKSLQRLRGTAGGKGRAKKLEPLERLRKAEHNWVHTQNHLFSREVVDFAVKSHAATIHMEDLSGFGKDNDGNADERKEFVLRNWSYYELQNMIAYKAAKYGIKVEKIHPAYTSKTCSWCGQLGFREGVTFICENPECKQCGEKVHADYNAARNIANSKDIIKKNE

SEQ ID NO: 261 - protein, 468 aa, Artificial Sequence
  Variant of CasM.19952
MPTITRKIELTLLTEGLSEEQRKEQWGLLYHINDNLYKAANNISSKLYLDDHVSSMVRMKHAEYLSLLKELARAEKQKTPDADAIAELRKKVAAAEKEMTDQEHAICKYATEMSTQSLSYRFATELETNIFRKILDCLKQGVFATFNSDARDVKRGERAIRNYKKGMPIPFAWDKSLRIEKDNKDFYLRWYNGLRFLFNFGKDRSNNRLIVERCLKMDADYDGEYKLCNSSIQIAKREGKTKLFLLLVVKIPQEHVELNKKVVVGVDLGINVPAYVATNITEERKAIGDREHFLNSRMAFQRRYKSLQRLRGTAGGKGRAKKLEPLERLRKAEHNWVHTQNHLFSREVVDFAVKSHAATIHMEDLSGFGKDNDGNADERKEFVLRNWSYYELQNMIAYKAAKYGIKVEKIHPAYTSKTCSWCGQLGFREGVTFICENPECKQCGEKVHADYNAARNIANSKDIIKKNE

SEQ ID NO: 262 - protein, 468 aa, Artificial Sequence
  Variant of CasM.19952
MPTITRKIELTLLTEGLSEEQRKEQWGLLYHINDNLYKAANNISSKLYLDDHVSSMVRMKHAEYLSLLKELARAEKQKTPDADAIAELRKKVAAAEKEMTDQEHAICKYATEMSTQSLSYRFATELETNIFAKILDCLKQGVFATFNSDARDVKRGERAIRNYKKGMPIPFAWDKSLRIEKDNKDFYLRWYNGLRFLFNFGKDRSNNRLIVERCLKMDADYDGEYKLCNSSIQIAKREGKTKLFLLLVVKIPQEHVELNKRVVVGVDLGINVPAYVATNITEERKAIGDREHFLNSRMAFQRRYKSLQRLRGTAGGKGRAKKLEPLERLRKAEHNWVHTQNHLFSREVVDFAVKSHAATIHMEDLSGFGKDNDGNADERKEFVLRNWSYYELQNMIAYKAAKYGIKVEKIHPAYTSKTCSWCGQLGFREGVTFICENPECKQCGEKVHADYNAARNIANSKDIIKKNE

SEQ ID NO: 263 - protein, 468 aa, Artificial Sequence
  Variant of CasM.19952
MPTITRKIELTLLTEGLSEEQRKEQWGLLYHINDNLYKAANNISSKLYLDDHVSSMVRMKHAEYLSLLKELARAEKQKTPDADAIAELRKKVAAAEKEMTDQEHAICKYATEMSTQSLSYRFATELETNIFAKILDCLKQGVFATFNSDARDVKRGERAIRNYKKGMPIPFAWDKSLRIEKDNKDFYLRWYNGLRFLFNFGKDRSNNRLIVERCLKMDADYDGEYKLCNSSIQIAKREGKTKLFLLLVVKIPQEHVELNKKVRVGVDLGINVPAYVATNITEERKAIGDREHFLNSRMAFQRRYKSLQRLRGTAGGKGRAKKLEPLERLRKAEHNWVHTQNHLFSREVVDFAVKSHAATIHMEDLSGFGKDNDGNADERKEFVLRNWSYYELQNMIAYKAAKYGIKVEKIHPAYTSKTCSWCGQLGFREGVTFICENPECKQCGEKVHADYNAARNIANSKDIIKKNE

SEQ ID NO: 264 - protein, 468 aa, Artificial Sequence
  Variant of CasM.19952
MPTITRKIELTLLTEGLSEEQRKEQWGLLYHINDNLYKAANNISSKLYLDDHVSSMVRMKHAEYLSLLKELARAEKQKTPDADAIAELRKKVAAAEKEMTDQEHAICKYATEMSTQSLSYRFATELETNIFAKILDCLKQGVFATFNSDARDVKRGERAIRNYKKGMPIPFAWDKSLRIEKDNKDFYLRWYNGLRFLFNFGKDRSNNRLIVERCLKMDADYDGEYKLCNSSIQIAKREGKTKLFLLLVVKIPQEHVELNKKVVRGVDLGINVPAYVATNITEERKAIGDREHFLNSRMAFQRRYKSLQRLRGTAGGKGRAKKLEPLERLRKAEHNWVHTQNHLFSREVVDFAVKSHAATIHMEDLSGFGKDNDGNADERKEFVLRNWSYYELQNMIAYKAAKYGIKVEKIHPAYTSKTCSWCGQLGFREGVTFICENPECKQCGEKVHADYNAARNIANSKDIIKKNE

SEQ ID NO: 265 - protein, 468 aa, Artificial Sequence
  Variant of CasM.19952
MPTITRKIELTLLTEGLSEEQRKEQWGLLYHINDNLYKAANNISSKLYLDDHVSSMVRMKHAEYLSLLKELARAEKQKTPDADAIAELRKKVAAAEKEMTDQEHAICKYATEMSTQSLSYRFATELETNIFAKILDCLKQGVFATFNSDARDVKRGERAIRNYKKGMPIPFAWDKSLRIEKDNKDFYLRWYNGLRFLFNFGKDRSNNRLIVERCLKMDADYDGEYKLCNSSIQIAKREGKTKLFLLLVVKIPQEHVELNKKVVVRVDLGINVPAYVATNITEERKAIGDREHFLNSRMAFQRRYKSLQRLRGTAGGKGRAKKLEPLERLRKAEHNWVHTQNHLFSREVVDFAVKSHAATIHMEDLSGFGKDNDGNADERKEFVLRNWSYYELQNMIAYKAAKYGIKVEKIHPAYTSKTCSWCGQLGFREGVTFICENPECKQCGEKVHADYNAARNIANSKDIIKKNE

SEQ ID NO: 266 - protein, 468 aa, Artificial Sequence
  Variant of CasM.19952
MPTITRKIELTLLTEGLSEEQRKEQWGLLYHINDNLYKAANNISSKLYLDDHVSSMVRMKHAEYLSLLKELARAEKQKTPDADAIAELRKKVAAAEKEMTDQEHAICKYATEMSTQSLSYRFATELETNIFAKILDCLKQGVFATFNSDARDVKRGERAIRNYKKGMPIPFAWDKSLRIEKDNKDFYLRWYNGLRFLFNFGKDRSNNRLIVERCLKMDADYDGEYKLCNSSIQIAKREGKTKLFLLLVVKIPQEHVELNKKVVVGRDLGINVPAYVATNITEERKAIGDREHFLNSRMAFQRRYKSLQRLRGTAGGKGRAKKLEPLERLRKAEHNWVHTQNHLFSREVVDFAVKSHAATIHMEDLSGFGKDNDGNADERKEFVLRNWSYYELQNMIAYKAAKYGIKVEKIHPAYTSKTCSWCGQLGFREGVTFICENPECKQCGEKVHADYNAARNIANSKDIIKKNE

SEQ ID NO: 267 - protein, 468 aa, Artificial Sequence
  Variant of CasM.19952
MPTITRKIELTLLTEGLSEEQRKEQWGLLYHINDNLYKAANNISSKLYLDDHVSSMVRMKHAEYLSLLKELARAEKQKTPDADAIAELRKKVAAAEKEMTDQEHAICKYATEMSTQSLSYRFATELETNIFAKILDCLKQGVFATFNSDARDVKRGERAIRNYKKGMPIPFAWDKSLRIEKDNKDFYLRWYNGLRFLFNFGKDRSNNRLIVERCLKMDADYDGEYKLCNSSIQIAKREGKTKLFLLLVVKIPQEHVELNKKVVVGVRLGINVPAYVATNITEERKAIGDREHFLNSRMAFQRRYKSLQRLRGTAGGKGRAKKLEPLERLRKAEHNWVHTQNHLFSREVVDFAVKSHAATIHMEDLSGFGKDNDGNADERKEFVLRNWSYYELQNMIAYKAAKYGIKVEKIHPAYTSKTCSWCGQLGFREGVTFICENPECKQCGEKVHADYNAARNIANSKDIIKKNE

SEQ ID NO: 268 - protein, 468 aa, Artificial Sequence
  Variant of CasM.19952
MPTITRKIELTLLTEGLSEEQRKEQWGLLYHINDNLYKAANNISSKLYLDDHVSSMVRMKHAEYLSLLKELARAEKQKTPDADAIAELRKKVAAAEKEMTDQEHAICKYATEMSTQSLSYRFATELETNIFAKILDCLKQGVFATFNSDARDVKRGERAIRNYKKGMPIPFAWDKSLRIEKDNKDFYLRWYNGLRFLFNFGKDRSNNRLIVERCLKMDADYDGEYKLCNSSIQIAKREGKTKLFLLLVVKIPQEHVELNKKVVVGVDRGINVPAYVATNITEERKAIGDREHFLNSRMAFQRRYKSLQRLRGTAGGKGRAKKLEPLERLRKAEHNWVHTQNHLFSREVVDFAVKSHAATIHMEDLSGFGKDNDGNADERKEFVLRNWSYYELQNMIAYKAAKYGIKVEKIHPAYTSKTCSWCGQLGFREGVTFICENPECKQCGEKVHADYNAARNIANSKDIIKKNE

SEQ ID NO: 269 - protein, 468 aa, Artificial Sequence
  Variant of CasM.19952
MPTITRKIELTLLTEGLSEEQRKEQWGLLYHINDNLYKAANNISSKLYLDDHVSSMVRMKHAEYLSLLKELARAEKQKTPDADAIAELRKKVAAAEKEMTDQEHAICKYATEMSTQSLSYRFATELETNIFAKILDCLKQGVFATFNSDARDVKRGERAIRNYKKGMPIPFAWDKSLRIEKDNKDFYLRWYNGLRFLFNFGKDRSNNRLIVERCLKMDADYDGEYKLCNSSIQIAKREGKTKLFLLLVVKIPQEHVELNKKVVVGVDLRINVPAYVATNITEERKAIGDREHFLNSRMAFQRRYKSLQRLRGTAGGKGRAKKLEPLERLRKAEHNWVHTQNHLFSREVVDFAVKSHAATIHMEDLSGFGKDNDGNADERKEFVLRNWSYYELQNMIAYKAAKYGIKVEKIHPAYTSKTCSWCGQLGFREGVTFICENPECKQCGEKVHADYNAARNIANSKDIIKKNE

SEQ ID NO: 270 - protein, 468 aa, Artificial Sequence
  Variant of CasM.19952
MPTITRKIELTLLTEGLSEEQRKEQWGLLYHINDNLYKAANNISSKLYLDDHVSSMVRMKHAEYLSLLKELARAEKQKTPDADAIAELRKKVAAAEKEMTDQEHAICKYATEMSTQSLSYRFATELETNIFAKILDCLKQGVFATFNSDARDVKRGERAIRNYKKGMPIPFAWDKSLRIEKDNKDFYLRWYNGLRFLFNFGKDRSNNRLIVERCLKMDADYDGEYKLCNSSIQIAKREGKTKLFLLLVVKIPQEHVELNKKVVVGVDLGRNVPAYVATNITEERKAIGDREHFLNSRMAFQRRYKSLQRLRGTAGGKGRAKKLEPLERLRKAEHNWVHTQNHLFSREVVDFAVKSHAATIHMEDLSGFGKDNDGNADERKEFVLRNWSYYELQNMIAYKAAKYGIKVEKIHPAYTSKTCSWCGQLGFREGVTFICENPECKQCGEKVHADYNAARNIANSKDIIKKNE

SEQ ID NO: 271 - protein, 468 aa, Artificial Sequence
  Variant of CasM.19952
MPTITRKIELTLLTEGLSEEQRKEQWGLLYHINDNLYKAANNISSKLYLDDHVSSMVRMKHAEYLSLLKELARAEKQKTPDADAIAELRKKVAAAEKEMTDQEHAICKYATEMSTQSLSYRFATELETNIFAKILDCLKQGVFATFNSDARDVKRGERAIRNYKKGMPIPFAWDKSLRIEKDNKDFYLRWYNGLRFLFNFGKDRSNNRLIVERCLKMDADYDGEYKLCNSSIQIAKREGKTKLFLLLVVKIPQEHVELNKKVVVGVDLGIRVPAYVATNITEERKAIGDREHFLNSRMAFQRRYKSLQRLRGTAGGKGRAKKLEPLERLRKAEHNWVHTQNHLFSREVVDFAVKSHAATIHMEDLSGFGKDNDGNADERKEFVLRNWSYYELQNMIAYKAAKYGIKVEKIHPAYTSKTCSWCGQLGFREGVTFICENPECKQCGEKVHADYNAARNIANSKDIIKKNE

SEQ ID NO: 272 - protein, 468 aa, Artificial Sequence
  Variant of CasM.19952
MPTITRKIELTLLTEGLSEEQRKEQWGLLYHINDNLYKAANNISSKLYLDDHVSSMVRMKHAEYLSLLKELARAEKQKTPDADAIAELRKKVAAAEKEMTDQEHAICKYATEMSTQSLSYRFATELETNIFAKILDCLKQGVFATFNSDARDVKRGERAIRNYKKGMPIPFAWDKSLRIEKDNKDFYLRWYNGLRFLFNFGKDRSNNRLIVERCLKMDADYDGEYKLCNSSIQIAKREGKTKLFLLLVVKIPQEHVELNKKVVVGVDLGINRPAYVATNITEERKAIGDREHFLNSRMAFQRRYKSLQRLRGTAGGKGRAKKLEPLERLRKAEHNWVHTQNHLFSREVVDFAVKSHAATIHMEDLSGFGKDNDGNADERKEFVLRNWSYYELQNMIAYKAAKYGIKVEKIHPAYTSKTCSWCGQLGFREGVTFICENPECKQCGEKVHADYNAARNIANSKDIIKKNE

SEQ ID NO: 273 - protein, 468 aa, Artificial Sequence
  Variant of CasM.19952
MPTITRKIELTLLTEGLSEEQRKEQWGLLYHINDNLYKAANNISSKLYLDDHVSSMVRMKHAEYLSLLKELARAEKQKTPDADAIAELRKKVAAAEKEMTDQEHAICKYATEMSTQSLSYRFATELETNIFAKILDCLKQGVFATFNSDARDVKRGERAIRNYKKGMPIPFAWDKSLRIEKDNKDFYLRWYNGLRFLFNFGKDRSNNRLIVERCLKMDADYDGEYKLCNSSIQIAKREGKTKLFLLLVVKIPQEHVELNKKVVVGVDLGINVRAYVATNITEERKAIGDREHFLNSRMAFQRRYKSLQRLRGTAGGKGRAKKLEPLERLRKAEHNWVHTQNHLFSREVVDFAVKSHAATIHMEDLSGFGKDNDGNADERKEFVLRNWSYYELQNMIAYKAAKYGIKVEKIHPAYTSKTCSWCGQLGFREGVTFICENPECKQCGEKVHADYNAARNIANSKDIIKKNE

SEQ ID NO: 274 - protein, 468 aa, Artificial Sequence
  Variant of CasM.19952
MPTITRKIELTLLTEGLSEEQRKEQWGLLYHINDNLYKAANNISSKLYLDDHVSSMVRMKHAEYLSLLKELARAEKQKTPDADAIAELRKKVAAAEKEMTDQEHAICKYATEMSTQSLSYRFATELETNIFAKILDCLKQGVFATFNSDARDVKRGERAIRNYKKGMPIPFAWDKSLRIEKDNKDFYLRWYNGLRFLFNFGKDRSNNRLIVERCLKMDADYDGEYKLCNSSIQIAKREGKTKLFLLLVVKIPQEHVELNKKVVVGVDLGINVPRYVATNITEERKAIGDREHFLNSRMAFQRRYKSLQRLRGTAGGKGRAKKLEPLERLRKAEHNWVHTQNHLFSREVVDFAVKSHAATIHMEDLSGFGKDNDGNADERKEFVLRNWSYYELQNMIAYKAAKYGIKVEKIHPAYTSKTCSWCGQLGFREGVTFICENPECKQCGEKVHADYNAARNIANSKDIIKKNE

SEQ ID NO: 275 - protein, 468 aa, Artificial Sequence
  Variant of CasM.19952
MPTITRKIELTLLTEGLSEEQRKEQWGLLYHINDNLYKAANNISSKLYLDDHVSSMVRMKHAEYLSLLKELARAEKQKTPDADAIAELRKKVAAAEKEMTDQEHAICKYATEMSTQSLSYRFATELETNIFAKILDCLKQGVFATFNSDARDVKRGERAIRNYKKGMPIPFAWDKSLRIEKDNKDFYLRWYNGLRFLFNFGKDRSNNRLIVERCLKMDADYDGEYKLCNSSIQIAKREGKTKLFLLLVVKIPQEHVELNKKVVVGVDLGINVPARVATNITEERKAIGDREHFLNSRMAFQRRYKSLQRLRGTAGGKGRAKKLEPLERLRKAEHNWVHTQNHLFSREVVDFAVKSHAATIHMEDLSGFGKDNDGNADERKEFVLRNWSYYELQNMIAYKAAKYGIKVEKIHPAYTSKTCSWCGQLGFREGVTFICENPECKQCGEKVHADYNAARNIANSKDIIKKNE

SEQ ID NO: 276 - protein, 468 aa, Artificial Sequence; identical to SEQ ID NO: 275
  Variant of CasM.19952

SEQ ID NO: 277 - protein, 468 aa, Artificial Sequence
  Variant of CasM.19952
MPTITRKIELTLLTEGLSEEQRKEQWGLLYHINDNLYKAANNISSKLYLDDHVSSMVRMKHAEYLSLLKELARAEKQKTPDADAIAELRKKVAAAEKEMTDQEHAICKYATEMSTQSLSYRFATELETNIFAKILDCLKQGVFATFNSDARDVKRGERAIRNYKKGMPIPFAWDKSLRIEKDNKDFYLRWYNGLRFLFNFGKDRSNNRLIVERCLKMDADYDGEYKLCNSSIQIAKREGKTKLFLLLVVKIPQEHVELNKKVVVGVDLGINVPAYVRTNITEERKAIGDREHFLNSRMAFQRRYKSLQRLRGTAGGKGRAKKLEPLERLRKAEHNWVHTQNHLFSREVVDFAVKSHAATIHMEDLSGFGKDNDGNADERKEFVLRNWSYYELQNMIAYKAAKYGIKVEKIHPAYTSKTCSWCGQLGFREGVTFICENPECKQCGEKVHADYNAARNIANSKDIIKKNE

SEQ ID NO: 278 - protein, 468 aa, Artificial Sequence
  Variant of CasM.19952
MPTITRKIELTLLTEGLSEEQRKEQWGLLYHINDNLYKAANNISSKLYLDDHVSSMVRMKHAEYLSLLKELARAEKQKTPDADAIAELRKKVAAAEKEMTDQEHAICKYATEMSTQSLSYRFATELETNIFAKILDCLKQGVFATFNSDARDVKRGERAIRNYKKGMPIPFAWDKSLRIEKDNKDFYLRWYNGLRFLFNFGKDRSNNRLIVERCLKMDADYDGEYKLCNSSIQIAKREGKTKLFLLLVVKIPQEHVELNKKVVVGVDLGINVPAYVARNITEERKAIGDREHFLNSRMAFQRRYKSLQRLRGTAGGKGRAKKLEPLERLRKAEHNWVHTQNHLFSREVVDFAVKSHAATIHMEDLSGFGKDNDGNADERKEFVLRNWSYYELQNMIAYKAAKYGIKVEKIHPAYTSKTCSWCGQLGFREGVTFICENPECKQCGEKVHADYNAARNIANSKDIIKKNE

SEQ ID NO: 279 - protein, 468 aa, Artificial Sequence
  Variant of CasM.19952
MPTITRKIELTLLTEGLSEEQRKEQWGLLYHINDNLYKAANNISSKLYLDDHVSSMVRMKHAEYLSLLKELARAEKQKTPDADAIAELRKKVAAAEKEMTDQEHAICKYATEMSTQSLSYRFATELETNIFAKILDCLKQGVFATFNSDARDVKRGERAIRNYKKGMPIPFAWDKSLRIEKDNKDFYLRWYNGLRFLFNFGKDRSNNRLIVERCLKMDADYDGEYKLCNSSIQIAKREGKTKLFLLLVVKIPQEHVELNKKVVVGVDLGINVPAYVATRITEERKAIGDREHFLNSRMAFQRRYKSLQRLRGTAGGKGRAKKLEPLERLRKAEHNWVHTQNHLFSREVVDFAVKSHAATIHMEDLSGFGKDNDGNADERKEFVLRNWSYYELQNMIAYKAAKYGIKVEKIHPAYTSKTCSWCGQLGFREGVTFICENPECKQCGEKVHADYNAARNIANSKDIIKKNE

SEQ ID NO: 280 - protein, 468 aa, Artificial Sequence
  Variant of CasM.19952
MPTITRKIELTLLTEGLSEEQRKEQWGLLYHINDNLYKAANNISSKLYLDDHVSSMVRMKHAEYLSLLKELARAEKQKTPDADAIAELRKKVAAAEKEMTDQEHAICKYATEMSTQSLSYRFATELETNIFAKILDCLKQGVFATFNSDARDVKRGERAIRNYKKGMPIPFAWDKSLRIEKDNKDFYLRWYNGLRFLFNFGKDRSNNRLIVERCLKMDADYDGEYKLCNSSIQIAKREGKTKLFLLLVVKIPQEHVELNKKVVVGVDLGINVPAYVATNRTEERKAIGDREHFLNSRMAFQRRYKSLQRLRGTAGGKGRAKKLEPLERLRKAEHNWVHTQNHLFSREVVDFAVKSHAATIHMEDLSGFGKDNDGNADERKEFVLRNWSYYELQNMIAYKAAKYGIKVEKIHPAYTSKTCSWCGQLGFREGVTFICENPECKQCGEKVHADYNAARNIANSKDIIKKNE

SEQ ID NO: 281 - protein, 468 aa, Artificial Sequence; identical to SEQ ID NO: 280
  Variant of CasM.19952

SEQ ID NO: 282 - protein, 468 aa, Artificial Sequence
  Variant of CasM.19952
MPTITRKIELTLLTEGLSEEQRKEQWGLLYHINDNLYKAANNISSKLYLDDHVSSMVRMKHAEYLSLLKELARAEKQKTPDADAIAELRKKVAAAEKEMTDQEHAICKYATEMSTQSLSYRFATELETNIFAKILDCLKQGVFATFNSDARDVKRGERAIRNYKKGMPIPFAWDKSLRIEKDNKDFYLRWYNGLRFLFNFGKDRSNNRLIVERCLKMDADYDGEYKLCNSSIQIAKREGKTKLFLLLVVKIPQEHVELNKKVVVGVDLGINVPAYVATNITRERKAIGDREHFLNSRMAFQRRYKSLQRLRGTAGGKGRAKKLEPLERLRKAEHNWVHTQNHLFSREVVDFAVKSHAATIHMEDLSGFGKDNDGNADERKEFVLRNWSYYELQNMIAYKAAKYGIKVEKIHPAYTSKTCSWCGQLGFREGVTFICENPECKQCGEKVHADYNAARNIANSKDIIKKNE

SEQ ID NO: 283 - protein, 468 aa, Artificial Sequence
  Variant of CasM.19952
MPTITRKIELTLLTEGLSEEQRKEQWGLLYHINDNLYKAANNISSKLYLDDHVSSMVRMKHAEYLSLLKELARAEKQKTPDADAIAELRKKVAAAEKEMTDQEHAICKYATEMSTQSLSYRFATELETNIFAKILDCLKQGVFATFNSDARDVKRGERAIRNYKKGMPIPFAWDKSLRIEKDNKDFYLRWYNGLRFLFNFGKDRSNNRLIVERCLKMDADYDGEYKLCNSSIQIAKREGKTKLFLLLVVKIPQEHVELNKKVVVGVDLGINVPAYVATNITEERKAIGDREHFLNSRMAFQRRYKSLQRLRGTAGGKGRAKKLEPLERLRKAEHNWVHTQNHLFSREVVDFAVKSHAATIHMEDLSGFGKDNDGNADERKEFVLRNWSYYELQNMIAYKAAKYGIKVEKIHPAYTSKTCSWCGQLGFREGVTFICENPECKQCGEKVHADYNAARNRANSKDIIKKNE

SEQ ID NO: 284 - protein, 468 aa, Artificial Sequence
  Variant of CasM.19952
MPTITRKIELTLLTEGLSEEQRKEQWGLLYHINDNLYKAANNISSKLYLDDHVSSMVRMKHAEYLSLLKELARAEKQKTPDADAIAELRKKVAAAEKEMTDQEHAICKYATEMSTQSLSYRFATELETNIFAKILDCLKQGVFATFNSDARDVKRGERAIRNYKKGMPIPFAWDKSLRIEKDNKDFYLRWYNGLRFLFNFGKDRSNNRLIVERCLKMDADYDGEYKLCNSSIQIAKREGKTKLFLLLVVKIPQEHVELNKKVVVGVDLGINVPAYVATNITEERKAIGDREHFLNSRMAFQRRYKSLQRLRGTAGGKGRAKKLEPLERLRKAEHNWVHTQNHLFSREVVDFAVKSHAATIHMEDLSGFGKDNDGNADERKEFVLRNWSYYELQNMIAYKAAKYGIKVEKIHPAYTSKTCSWCGQLGFREGVTFICENPECKQCGEKVHADYNAARNIRNSKDIIKKNE

SEQ ID NO: 285 - protein, 468 aa, Artificial Sequence
  Variant of CasM.19952
MPTITRKIELTLLTEGLSEEQRKEQWGLLYHINDNLYKAANNISSKLYLDDHVSSMVRMKHAEYLSLLKELARAEKQKTPDADAIAELRKKVAAAEKEMTDQEHAICKYATEMSTQSLSYRFATELETNIFAKILDCLKQGVFATFNSDARDVKRGERAIRNYKKGMPIPFAWDKSLRIEKDNKDFYLRWYNGLRFLFNFGKDRSNNRLIVERCLKMDADYDGEYKLCNSSIQIAKREGKTKLFLLLVVKIPQEHVELNKKVVVGVDLGINVPAYVATNITEERKAIGDREHFLNSRMAFQRRYKSLQRLRGTAGGKGRAKKLEPLERLRKAEHNWVHTQNHLFSREVVDFAVKSHAATIHMEDLSGFGKDNDGNADERKEFVLRNWSYYELQNMIAYKAAKYGIKVEKIHPAYTSKTCSWCGQLGFREGVTFICENPECKQCGEKVHADYNAARNIARSKDIIKKNE

SEQ ID NO: 286 - protein, 468 aa, Artificial Sequence
  Variant of CasM.19952
MPTITRKIELTLLTEGLSEEQRKEQWGLLYHINDNLYKAANNISSKLYLDDHVSSMVRMKHAEYLSLLKELARAEKQKTPDADAIAELRKKVAAAEKEMTDQEHAICKYATEMSTQSLSYRFATELETNIFAKILDCLKQGVFATFNSDARDVKRGERAIRNYKKGMPIPFAWDKSLRIEKDNKDFYLRWYNGLRFLFNFGKDRSNNRLIVERCLKMDADYDGEYKLCNSSIQIAKREGKTKLFLLLVVKIPQEHVELNKKVVVGVDLGINVPAYVATNITEERKAIGDREHFLNSRMAFQRRYKSLQRLRGTAGGKGRAKKLEPLERLRKAEHNWVHTQNHLFSREVVDFAVKSHAATIHMEDLSGFGKDNDGNADERKEFVLRNWSYYELQNMIAYKAAKYGIKVEKIHPAYTSKTCSWCGQLGFREGVTFICENPECKQCGEKVHADYNAARNIANRKDIIKKNE

SEQ ID NO: 287 - protein, 468 aa, Artificial Sequence
  Variant of CasM.19952
MPTITRKIELTLLTEGLSEEQRKEQWGLLYHINDNLYKAANNISSKLYLDDHVSSMVRMKHAEYLSLLKELARAEKQKTPDADAIAELRKKVAAAEKEMTDQEHAICKYATEMSTQSLSYRFATELETNIFAKILDCLKQGVFATFNSDARDVKRGERAIRNYKKGMPIPFAWDKSLRIEKDNKDFYLRWYNGLRFLFNFGKDRSNNRLIVERCLKMDADYDGEYKLCNSSIQIAKREGKTKLFLLLVVKIPQEHVELNKKVVVGVDLGINVPAYVATNITEERKAIGDREHFLNSRMAFQRRYKSLQRLRGTAGGKGRAKKLEPLERLRKAEHNWVHTQNHLFSREVVDFAVKSHAATIHMEDLSGFGKDNDGNADERKEFVLRNWSYYELQNMIAYKAAKYGIKVEKIHPAYTSKTCSWCGQLGFREGVTFICENPECKQCGEKVHADYNAARNIANSRDIIKKNE

SEQ ID NO: 288 - protein, 468 aa, Artificial Sequence
  Variant of CasM.19952
MPTITRKIELTLLTEGLSEEQRKEQWGLLYHINDNLYKAANNISSKLYLDDHVSSMVRMKHAEYLSLLKELARAEKQKTPDADAIAELRKKVAAAEKEMTDQEHAICKYATEMSTQSLSYRFATELETNIFAKILDCLKQGVFATFNSDARDVKRGERAIRNYKKGMPIPFAWDKSLRIEKDNKDFYLRWYNGLRFLFNFGKDRSNNRLIVERCLKMDADYDGEYKLCNSSIQIAKREGKTKLFLLLVVKIPQEHVELNKKVVVGVDLGINVPAYVATNITEERKAIGDREHFLNSRMAFQRRYKSLQRLRGTAGGKGRAKKLEPLERLRKAEHNWVHTQNHLFSREVVDFAVKSHAATIHMEDLSGFGKDNDGNADERKEFVLRNWSYYELQNMIAYKAAKYGIKVEKIHPAYTSKTCSWCGQLGFREGVTFICENPECKQCGEKVHADYNAARNIANSKRIIKKNE

SEQ ID NO: 289 - protein, 468 aa, Artificial Sequence
  Variant of CasM.19952
MPTITRKIELTLLTEGLSEEQRKEQWGLLYHINDNLYKAANNISSKLYLDDHVSSMVRMKHAEYLSLLKELARAEKQKTPDADAIAELRKKVAAAEKEMTDQEHAICKYATEMSTQSLSYRFATELETNIFAKILDCLKQGVFATFNSDARDVKRGERAIRNYKKGMPIPFAWDKSLRIEKDNKDFYLRWYNGLRFLFNFGKDRSNNRLIVERCLKMDADYDGEYKLCNSSIQIAKREGKTKLFLLLVVKIPQEHVELNKKVVVGVDLGINVPAYVATNITEERKAIGDREHFLNSRMAFQRRYKSLQRLRGTAGGKGRAKKLEPLERLRKAEHNWVHTQNHLFSREVVDFAVKSHAATIHMEDLSGFGKDNDGNADERKEFVLRNWSYYELQNMIAYKAAKYGIKVEKIHPAYTSKTCSWCGQLGFREGVTFICENPECKQCGEKVHADYNAARNIANSKDRIKKNE

SEQ ID NO: 290 - protein, 468 aa, Artificial Sequence
  Variant of CasM.19952
MPTITRKIELTLLTEGLSEEQRKEQWGLLYHINDNLYKAANNISSKLYLDDHVSSMVRMKHAEYLSLLKELARAEKQKTPDADAIAELRKKVAAAEKEMTDQEHAICKYATEMSTQSLSYRFATELETNIFAKILDCLKQGVFATFNSDARDVKRGERAIRNYKKGMPIPFAWDKSLRIEKDNKDFYLRWYNGLRFLFNFGKDRSNNRLIVERCLKMDADYDGEYKLCNSSIQIAKREGKTKLFLLLVVKIPQEHVELNKKVVVGVDLGINVPAYVATNITEERKAIGDREHFLNSRMAFQRRYKSLQRLRGTAGGKGRAKKLEPLERLRKAEHNWVHTQNHLFSREVVDFAVKSHAATIHMEDLSGFGKDNDGNADERKEFVLRNWSYYELQNMIAYKAAKYGIKVEKIHPAYTSKTCSWCGQLGFREGVTFICENPECKQCGEKVHADYNAARNIANSKDIRKKNE

SEQ ID NO: 291 - protein, 468 aa, Artificial Sequence
  Variant of CasM.19952
MPTITRKIELTLLTEGLSEEQRKEQWGLLYHINDNLYKAANNISSKLYLDDHVSSMVRMKHAEYLSLLKELARAEKQKTPDADAIAELRKKVAAAEKEMTDQEHAICKYATEMSTQSLSYRFATELETNIFAKILDCLKQGVFATFNSDARDVKRGERAIRNYKKGMPIPFAWDKSLRIEKDNKDFYLRWYNGLRFLFNFGKDRSNNRLIVERCLKMDADYDGEYKLCNSSIQIAKREGKTKLFLLLVVKIPQEHVELNKKVVVGVDLGINVPAYVATNITEERKAIGDREHFLNSRMAFQRRYKSLQRLRGTAGGKGRAKKLEPLERLRKAEHNWVHTQNHLFSREVVDFAVKSHAATIHMEDLSGFGKDNDGNADERKEFVLRNWSYYELQNMIAYKAAKYGIKVEKIHPAYTSKTCSWCGQLGFREGVTFICENPECKQCGEKVHADYNAARNIANSKDIIKRNE

SEQ ID NO: 292 - protein, 468 aa, Artificial Sequence
  Variant of CasM.19952
MPTITRKIELTLLTEGLSEEQRKEQWGLLYHINDNLYKAANNISSKLYLDDHVSSMVRMKHAEYLSLLKELARAEKQKTPDADAIAELRKKVAAAEKEMTDQEHAICKYATEMSTQSLSYRFATELETNIFAKILDCLKQGVFATFNSDARDVKRGERAIRNYKKGMPIPFAWDKSLRIEKDNKDFYLRWYNGLRFLFNFGKDRSNNRLIVERCLKMDADYDGEYKLCNSSIQIAKREGKTKLFLLLVVKIPQEHVELNKKVVVGVDLGINVPAYVATNITEERKAIGDREHFLNSRMAFQRRYKSLQRLRGTAGGKGRAKKLEPLERLRKAEHNWVHTQNHLFSREVVDFAVKSHAATIHMEDLSGFGKDNDGNADERKEFVLRNWSYYELQNMIAYKAAKYGIKVEKIHPAYTSKTCSWCGQLGFREGVTFICENPECKQCGEKVHADYNAARNIANSKDIIKKRE

SEQ ID NO: 293 - protein, 468 aa, Artificial Sequence
  Variant of CasM.19952
MPTITRKIELTLLTEGLSEEQRKEQWGLLYHINDNLYKAANNISSKLYLDDHVSSMVRMKHAEYLSLLKELARAEKQKTPDADAIAELRKKVAAAEKEMTDQEHAICKYATEMSTQSLSYRFATELETNIFAKILDCLKQGVFATFNSDARDVKRGERAIRNYKKGMPIPFAWDKSLRIEKDNKDFYLRWYNGLRFLFNFGKDRSNNRLIVERCLKMDADYDGEYKLCNSSIQIAKREGKTKLFLLLVVKIPQEHVELNKKVVVGVDLGINVPAYVATNITEERKAIGDREHFLNSRMAFQRRYKSLQRLRGTAGGKGRAKKLEPLERLRKAEHNWVHTQNHLFSREVVDFAVKSHAATIHMEDLSGFGKDNDGNADERKEFVLRNWSYYELQNMIAYKAAKYGIKVEKIHPAYTSKTCSWCGQLGFREGVTFICENPECKQCGEKVHADYNAARNIANSKDIIKKNR

SEQ ID NO: 294 - DNA, 20 bp, Artificial Sequence
  B2M
gatggatgaaacccagacac

SEQ ID NO: 295 - DNA, 53 bp, Artificial Sequence
  Forward Amplicon Primers
tcgtcggcagcgtcagatgtgtataagagacagcccaagtgaaataccctggc

SEQ ID NO: 296 - DNA, 54 bp, Artificial Sequence
  Reverse Amplicon Primers
gtctcgtgggctcggagatgtgtataagagacagcagtgggggtgaattcagtg

SEQ ID NO: 297 - protein, 20 aa, Artificial Sequence
  B2M4
GGCCGAGATGTCTCGCTCCG

SEQ ID NO: 298 - protein, 53 aa, Artificial Sequence
  Forward Amplicon Primers
TCGTCGGCAGCGTCAGATGTGTATAAGAGACAGCCTCTCTCTAACCTGGCACT

SEQ ID NO: 299 - protein, 53 aa, Artificial Sequence
  Reverse Amplicon Primers
GTCTCGTGGGCTCGGAGATGTGTATAAGAGACAGGAGGGTAGGAGAGACTCAC

SEQ ID NO: 300 - protein, 523 aa, Artificial Sequence
  VPR
DALDDFDLDMLGSDALDDFDLDMLGSDALDDFDLDMLGSDALDDFDLDMLINSRSSGSPKKKRKVGSQYLPDTDDRHRIEEKRKRTYETFKSIMKKSPFSGPTDPRPPPRRIAVPSRSSASVPKPAPQPYPFTSSLSTINYDEFPTMVFPSGQISQASALAPAPPQVLPQAPAPAPAPAMVSALAQAPAPVPVLAPGPPQAVAPPAPKPTQAGEGTLSEALLQLQFDDEDLGALLGNSTDPAVFTDLASVDNSEFQQLLNQGIPVAPHTTEPMLMEYPEAITRLVTGAQRPPDPAPAPLGAPGLPNGLLSGDEDFSSIADMDFSALLGSGSGSRDSREGMFLPKPEAGSAISDVFEGREVCQPKRIRPFHPPGSPWANRPLPASLAPTPTGPVHEPVGSLTPAPVPQPLDPAPAVTPEASHLLEDPDEETSQAVKALREMADTVIPQKEEAAICGQMDLSHPPPRGHLDELTTTLESMTEDLNLDSPLTPELNEILDTFLNDECLLHAMHISTGLSIFDTSLF

SEQ ID NO: 301-371 - skipped (71 entries)

SEQ ID NO: 372 - RNA, 108 nt, Artificial Sequence
  crRNA guide nucleic acid
agggcgacuucccguccugaaaucgagaaagugacaaggaaagcgcaauuuugcgccguuguaauacacucgagaaggucaagguguacauaguaauccguacacgac

SEQ ID NO: 373 - RNA, 149 nt, Artificial Sequence
  sgRNA guide nucleic acid
agggcgacuucccguccugaaaucgagaaagugacaaggaaagcgcaauuuugcgccguuguaauacacucgagaaggucaagguguacauaguaauccguacacgacgaaagcugggugaguugaagguauuaaauacucguauugcu

SEQ ID NO: 374 - RNA, 180 nt, Artificial Sequence
  sgRNA guide nucleic acid
agggcgacucggcguccuaaaaucgagaaaguguacauaaguauuuaacaaaauacgguaaauacucucgguaagguuuuaacgugcacauaauaauccgugcaacaggguuacacuuuuguugaaaguugcaacuuacgcauagguguaaaauacgagguauuaaauacucguauugcu

SEQ ID NO: 375 - RNA, 181 nt, Artificial Sequence
  sgRNA guide nucleic acid
ggggcggcucggcgucccaaaaucgagaaaguauauguaaaucugaauuuauucaguaguagauacacucgauaagguauaaacaauacacauuuuaauccguguauugaacuuauuuagcuauugaaaguugcaauucguaugcgcagguaaguuucgaguauuaaauacucguauugcu

SEQ ID NO: 376 - RNA, 174 nt, Artificial Sequence
  sgRNA guide nucleic acid
aaacaagggcggcucaacguccuagaaucgagaaaguaugcguaagacuuauuuauugagcgguagauacucucgguaagguauaaauuccacaaugaaaauccuguggacaccguauaauaugugcauguuugaaaugugcaugaggugugaguauuaaauacucguauugcu

SEQ ID NO: 377 - RNA, 118 nt, Artificial Sequence
  sgRNA guide nucleic acid
uucuuuccucggaaagugguagauacucucgguaagguaaacuguguaugaacaguuugaaauccugcacauaaaaugaaacaggcguaagaugugaguauuaaauacucguauugcu

SEQ ID NO: 378 - RNA, 125 nt, Artificial Sequence
  sgRNA guide nucleic acid
ucgggcggcucggcguccguaaaccgagaaaguauauguaagucugaauuuauucagcguuagauacacucgguaagguucaaagaaauauggguaugcugcgaguauuaaauacucguauugcu

SEQ ID NO: 379 - RNA, 167 nt, Artificial Sequence
  sgRNA guide nucleic acid
ucgggcggcucggcguccguaaaccgagaaaguauauguaagucugaauuuauucagcguuagauacacucgguaagguucaaacaauacauauucaauccauguauucaguauauuuguacauuugaaauauggguaugcugcgaguauuaaauacucguauugcu

SEQ ID NO: 380 - RNA, 143 nt, Artificial Sequence
  sgRNA guide nucleic acid
uagaagguucacacaauuucagggcgacucggcguccuaaaaucgagaaaguguacauaaauuuuuaacaaaauacgguaaauacucucgguaagguuuuaagaaauagguguaaaauacgaguauuaaauacucguauugcu

SEQ ID NO: 381 - RNA, 172 nt, Artificial Sequence
  sgRNA guide nucleic acid
cagggcgacucggcguccuaaaaucgagaaaguguacauaaauuuuuaacaaaauacgguaaauacucucgguaagguuuuaacgugcacauaauaauccgugcaacaggguuacacuuuugugcaauuuugaaauagguguaaaauacgaguauuaaauacucguauugcu

SEQ ID NO: 382 - RNA, 192 nt, Artificial Sequence
  sgRNA guide nucleic acid
auaaguugccgccgauaaauauugcgauagcccacgggcaauugcgcaaccggcggcgauaggccgacucgaacggccugaaaguugagaaggcacauguuggaggaaauuuuuuucccauuguguuuucgcucacuaauacacgcaacuugaaaugcgguguaauucgagguauuaaauacucguauugcu

SEQ ID NO: 383 - RNA, 56 nt, Artificial Sequence
  crRNA guide nucleic acid
ggugugaacgaccuuuuuuugcgguguaauucgagguauuaaauacucguauugcu

SEQ ID NO: 384 - RNA, 92 nt, Artificial Sequence
  crRNA guide nucleic acid
uaggccgacucgaacggccugaaaguugagaaggcacauguuggaggaaauuuuuuucccauuguguuuucgcucacuaauacacgcaacuu

SEQ ID NO: 385 - RNA, 133 nt, Artificial Sequence
  sgRNA guide nucleic acid
uaggccgacucgaacggccugaaaguugagaaggcacauguuggaggaaauuuuuuucccauuguguuuucgcucacuaauacacgcaacuugaaaugcgguguaauucgagguauuaaauacucguauugcu

SEQ ID NO: 386 - RNA, 136 nt, Artificial Sequence
  sgRNA guide nucleic acid
uaggccgacucgaacggccugaaaguugagaaggcacauauuagaggaaauuuguuucccauuguguuuucgcucacuaauacacgcaaguuuugaaauugcgguguacuucgagguauuaaauacucguauugcu

SEQ ID NO: 387 - RNA, 190 nt, Artificial Sequence
  sgRNA guide nucleic acid
uugccggcggcaaaaauugcgauagccuccgggcaauugcgcaaucgccggcgauaggccgacucgaacggccugaaaguugagaaggcacauauuagaggaaauuuguuucccauuguguuuucgcucacuaauacacgcaaguuuugaaauugcgguguacuucgagguauuaaauacucguauugcu

SEQ ID NO: 388 - RNA, 126 nt, Artificial Sequence
  sgRNA guide nucleic acid
ggggcgacuucccgucccaaaaucgagaaaguggucguaagucucgaucggaucgaagcagacaauacacucgaaaagguuaagugaaaagcguguggcuugaagguauuaaauacucguauugcu

SEQ ID NO: 389 - RNA, 126 nt, Artificial Sequence; identical to SEQ ID NO: 388
  sgRNA guide nucleic acid

SEQ ID NO: 390 - RNA, 123 nt, Artificial Sequence
  sgRNA guide nucleic acid
ggggcgacuucccgucccuaaaucgagaaaguggcgguaagacuucggucuucgaagcgcgcaauacacucgaaaagguuaagaaaugaaugcgacuugaagguauuaaauacucguauugcu

SEQ ID NO: 391 - RNA, 149 nt, Artificial Sequence
  sgRNA guide nucleic acid
ggggcgacuucccgucccuaaaucgagaaaguggcgguaagacuucggucuucgaagcgcgcaauacacucgaaaagguuaagaugcacauaguaauccgugcauggggaaaugaaugcgacuugaagguauuaaauacucguauugcu

SEQ ID NO: 392 - RNA, 85 nt, Artificial Sequence
  sgRNA guide nucleic acid
auggggcaguugguugcccuuagccugaggcauuuaaugcacucgggaaguaccgaaaauccaacuauuaaauacucguauugcu

SEQ ID NO: 393 - RNA, 99 nt, Artificial Sequence
  sgRNA guide nucleic acid
auggggcaguugguugcccuuagccugaggcauuuaaugcacucgggaaguaccuuuucucagaaaagguacauccaacuauuaaauacucguauugcu

SEQ ID NO: 394 - RNA, 103 nt, Artificial Sequence
  sgRNA guide nucleic acid
auggggcaguugguugcccuuagccugaggcauuuaaugcacucgggaaguaccuuuucucagaaaggaaagguacauccaacuauuaaauacucguauugcu

SEQ ID NO: 395 - RNA, 107 nt, Artificial Sequence
  sgRNA guide nucleic acid
auggggcaguugguugcccuuagccugaggcauuuaaugcacucgggaaguaccuuuucucagaaaaaaaggaaagguacauccaacuauuaaauacucguauugcu

SEQ ID NO: 396 - RNA, 112 nt, Artificial Sequence
  sgRNA guide nucleic acid
auggggcaguugguugcccuuagccugaggcauuuaaugcacucgggaaguaccuuuucucagaaaauggcaaaaggaaagguacauccaacuauuaaauacucguauugcu

SEQ ID NO: 397 - RNA, 117 nt, Artificial Sequence
  sgRNA guide nucleic acid
augaauaggauuuauccuauggggcaguugguugcccuuagccugaggcauuuaaugcacucgggaaguaccuuuucucagaaaagguacauccaacuauuaaauacucguauugcu

SEQ ID NO: 398 - RNA, 99 nt, Artificial Sequence
  sgRNA guide nucleic acid
auggggcaguugguugcccuuagccugaggcauuuaaugcacucgggaaguaccuuuucucauucgagguacauccaacuauuaaauacucguauugcu

SEQ ID NO: 399 - RNA, 87 nt, Artificial Sequence
  sgRNA guide nucleic acid
auggggcaguugguugcccuuagccugaggcauuuaaugcacucgggagaaaagguacauccaacuauuaaauacucguauugcugu

SEQ ID NO: 400 - RNA, 87 nt, Artificial Sequence; identical to SEQ ID NO: 399
  sgRNA guide nucleic acid

SEQ ID NO: 401 - RNA, 92 nt, Artificial Sequence
  sgRNA guide nucleic acid
auggggcaguugguugcccuuagccugaggcauuuaaugcacucgggagaaaagguacauccaacuauuaaauacucguauugcuguucgau

SEQ ID NO: 402 - RNA, 95 nt, Artificial Sequence
  sgRNA guide nucleic acid
auggggcaguugguugcccuuagccugaggcauuuaaugcacucgggagaaaagguacauccaacuauuaaauacucguauugcuguucgauuau

SEQ ID NO: 403 - RNA, 109 nt, Artificial Sequence
  crRNA guide nucleic acid
agggcgacuucccguccuaaaaucgagauagugacaagucagucucuuaugaggagcauuguaauacacucgagaaggucaagguguacauaguaauccguacacgacg

SEQ ID NO: 404 - skipped

SEQ ID NO: 405 - RNA, 54 nt, Artificial Sequence
  crRNA guide nucleic acid
cguugcagcucgcacguuggcacuggguugaagguauuaaauacucguauugcu

SEQ ID NO: 406 - RNA, 123 nt, Artificial Sequence
  sgRNA guide nucleic acid
ggggcgucuucccgucccuaaaucgagauagcagccauuuuucuucauuuuugaagacggucuugcacucgaaaaggucaaggaaauuggcacugguugaagguauuaaauacucguauugcu

SEQ ID NO: 407 - RNA, 119 nt, Artificial Sequence
  sgRNA guide nucleic acid
ggggcgucuucccgucccuaaaucgagauagcagccauuuuucuucauuuuugaagacggucuugcacucgaaaaggucaaggaaacacugguugaagguauuaaauacucguauugcu

SEQ ID NO: 408 - RNA, 175 nt, Artificial Sequence
  sgRNA guide nucleic acid
auauuaagggcggcucagcguccuuaagucgagaaaguauacauaaauuucuuauauagaauaguagauacucucggcaagguauaaacccuacaaauuuaauccuuguaggcaacuuauauuuguauuuauuugaaacauauguagguugugaguauuaaauacucguauugcu

SEQ ID NO: 409 - RNA, 171 nt, Artificial Sequence
  sgRNA guide nucleic acid
auauuaagggcggcucagcguccuuaagucgagaaaguauacauaaauuucuuauauagaauaguagauacucucggcaagguauaaacccuacaaauuuaauccuuguaggcaacuuauauuuguauuuauuugaaauguagguugugaguauuaaauacucguauugcu

SEQ ID NO: 410 - RNA, 170 nt, Artificial Sequence
  sgRNA guide nucleic acid
aaacaagggcggcucaacguccuagaaucgagaaaguaugcguaagacuuauuuauugagcgguagauacucucgguaagguauaaauuccacaaugaaaauccuguggacaccguauaauaugugcauguuugaaacaugaggugugaguauuaaauacucguauugcu

SEQ ID NO: 411 - RNA, 131 nt, Artificial Sequence
  sgRNA guide nucleic acid
aaacaagggcggcucaacguccuagaaucgagaaaguaugcguaagacuuauuuauugagcgguagauacucucgguaagguauaaauucgaaaugugcaugaggugugaguauuaaauacucguauugcu

SEQ ID NO: 412 - RNA, 127 nt, Artificial Sequence
  sgRNA guide nucleic acid
aaacaagggcggcucaacguccuagaaucgagaaaguaugcguaagacuuauuuauugagcgguagauacucucgguaagguauaaauucgaaacaugaggugugaguauuaaauacucguauugcu

SEQ ID NO: 413 - RNA, 56 nt, Artificial Sequence
  crRNA guide nucleic acid
gaugugaacgaccuuuuuuugcggugugcuucgagguauuaaauacucguauugcu

SEQ ID NO: 414 - RNA, 151 nt, Artificial Sequence
  crRNA guide nucleic acid
uaugcugccgccgauaaagguugcgauagcuuucgggcaauugcgcaaccggcggcgauaggccgacucgaacggccugaaaguugagaaggcacauauuagaggaaaauuguuucccauuguguuuucgcucacuaacacacgcaaauuu

SEQ ID NO: 415 - RNA, 56 nt, Artificial Sequence
  crRNA guide nucleic acid
aaugugaacgaccuucuuuugcgguguacuucgagguauuaaauacucguauugcu

SEQ ID NO: 416 - RNA, 150 nt, Artificial Sequence
  crRNA guide nucleic acid
auguugccgccgauaaagguuacgauagccugcgggcaauugcguaaccggcggcgauaggccgacucgaacggccugaagguugagaaggcacaauaaguggaaaauuuguuucuucccauuguguucgcucaccaauacacgcaauuu

SEQ ID NO: 417 - RNA, 56 nt, Artificial Sequence
  crRNA guide nucleic acid
auuguaggcgaccuuuuuuugcgauguaguucgagguauuaaauacucguauugcu

SEQ ID NO: 418 - RNA, 98 nt, Artificial Sequence
  crRNA guide nucleic acid
aaggccggcucgaacggccugaagguugaguuuaaagucacauauaagcggaaaaaucagauuucccauuguguucgcucaccaauacgcgcaaauuu

SEQ ID NO: 419 - RNA, 149 nt, Artificial Sequence
  crRNA guide nucleic acid
aacugccgguaagauuacgauagccgaaaggcaauugcguaugcggcaguuaaggccggcucgaacggccugaagguugaguuuaaagucacauauaagcggaaaaaucagauuucccauuguguucgcucaccaauacgcgcaaauuu

SEQ ID NO: 420 - RNA, 56 nt, Artificial Sequence
  crRNA guide nucleic acid
guugcguuugcccgugauuucggguguguauacagguauuaaauacucguauugcu

SEQ ID NO: 421 - RNA, 88 nt, Artificial Sequence
  crRNA guide nucleic acid
ggccacccuguuuggccuuaaggugagaagugugcgaguaaguggugaaaaaucgcccguugcccacgcucaccgaaugacccgcacg

SEQ ID NO: 422 - RNA, 56 nt, Artificial Sequence
  crRNA guide nucleic acid
gguggauaucaucuuaaaaagugagguacauccaacuauuaaauacucguauugcu

SEQ ID NO: 423 - RNA, 105 nt, Artificial Sequence
  crRNA guide nucleic acid
gaauaauaauuucgauaugaaugaaaauaguugaauaaaaauauucaaaugggguuguuggaaacccuuaugcugagggcuuaugccacucgguaaguaccuuaa

SEQ ID NO: 424 - RNA, 56 nt, Artificial Sequence
  crRNA guide nucleic acid
gggguuguuggaaacccuuaugcugagggcuuaugccacucgguaaguaccuuaaa

SEQ ID NO: 425 - RNA, 165 nt, Artificial Sequence
  sgRNA guide nucleic acid
gaauaauaauuucgauaugaaugaaaauaguugaauaaaaauauucaaaugggguuguuggaaacccuuaugcugagggcuuaugccacucgguaaguaccuuaagaaagguggauaucaucuuaaaaagugagguacauccaacuauuaaauacucguauugcu

SEQ ID NO: 426 - RNA, 116 nt, Artificial Sequence
  sgRNA guide nucleic acid
gggguuguuggaaacccuuaugcugagggcuuaugccacucgguaaguaccuuaaagaaagguggauaucaucuuaaaaagugagguacauccaacuauuaaauacucguauugcu

SEQ ID NO: 427 - RNA, 56 nt, Artificial Sequence
  crRNA guide nucleic acid
ggcguaugucuaccugaaaaagaagguauauccaacuauuaaauacucguauugcu

SEQ ID NO: 428 - RNA, 98 nt, Artificial Sequence
  crRNA guide nucleic acid
aaguuuugaauaacaauaauauucaaauuggggcuguugggggcccuuaugcugagggauuauuccacucggcaaguaccuauauuaauggaggccag

SEQ ID NO: 429 - RNA, 69 nt, Artificial Sequence
  crRNA guide nucleic acid
ggggcuguugggggcccuuaugcugagggauuauuccacucggcaaguaccuauauuaauggaggccag

SEQ ID NO: 430 - RNA, 56 nt, Artificial Sequence
  crRNA guide nucleic acid
gauguaaaucaucuauaaaagaaagguacauccaacuauuaaauacucguauugcu

SEQ ID NO: 431 - RNA, 85 nt, Artificial Sequence
  crRNA guide nucleic acid
cuuuggauuuaaauauucaacgggguuguuggaaacccuuaugcugagggauuauuccacucgguaaguaccuuaaauaguuaua

SEQ ID NO: 432 - RNA, 64 nt, Artificial Sequence
  crRNA guide nucleic acid
gggguuguuggaaacccuuaugcugagggauuauuccacucgguaaguaccuuaaauaguuaua

SEQ ID NO: 433 - RNA, 145 nt, Artificial Sequence
  sgRNA guide nucleic acid
cuuuggauuuaaauauucaacgggguuguuggaaacccuuaugcugagggauuauuccacucgguaaguaccuuaaauaguuauagaaagauguaaaucaucuauaaaagaaagguacauccaacuauuaaauacucguauugcu

SEQ ID NO: 434 - RNA, 124 nt, Artificial Sequence
  sgRNA guide nucleic acid
gggguuguuggaaacccuuaugcugagggauuauuccacucgguaaguaccuuaaauaguuauagaaagauguaaaucaucuauaaaagaaagguacauccaacuauuaaauacucguauugcu

SEQ ID NO: 435 - RNA, 56 nt, Artificial Sequence
  crRNA guide nucleic acid
aguguaugauuaccuguaguaugagguacauccaacuauuaaauacucguauugcu

SEQ ID NO: 436 - RNA, 95 nt, Artificial Sequence
  crRNA guide nucleic acid
aaguuuugaauaacaauauuauucaaauuggggcaguuggaugcccuuaugcugagggauuauuccacucggcaaguaccaauaauaauggaugu

SEQ ID NO: 437 - RNA, 66 nt, Artificial Sequence
  crRNA guide nucleic acid
ggggcaguuggaugcccuuaugcugagggauuauuccacucggcaaguaccaauaauaauggaugu

SEQ ID NO: 438 - RNA, 56 nt, Artificial Sequence
  crRNA guide nucleic acid
gauaguuuuaacuuccauuugaaauguaaaugcaacuauuaaauacucguauugcu

SEQ ID NO: 439 - RNA, 105 nt, Artificial Sequence
  crRNA guide nucleic acid
ugaaauaugaaauaaauuuuauguaucauuuuuaaaaaacgggugguugcacauccgaagggugaggauuuuuucacucacuaauacuacaaauggaaaaauuua

SEQ ID NO: 440 - RNA, 69 nt, Artificial Sequence
  crRNA guide nucleic acid
cgggugguugcacauccgaagggugaggauuuuuucacucacuaauacuacaaauggaaaaauuuaaag

SEQ ID NO: 441 - RNA, 123 nt, Artificial Sequence
  sgRNA guide nucleic acid
auaggauucguccuauggggcaguugguugcccuuagccugaggcauuuauugcacucgggaaguuccuuaaucuaauggcuuucagaaaagguacauccaacuauuaaauacucguauugcu

SEQ ID NO: 442 - RNA, 107 nt, Artificial Sequence
  sgRNA guide nucleic acid
ggggcaguugguugcccuuagccugaggcauuuauugcacucgggaaguuccuuaaucuaauggcuuucagaaaagguacauccaacuauuaaauacucguauugcu

SEQ ID NO: 443 - RNA, 123 nt, Artificial Sequence
  sgRNA guide nucleic acid
auaggauuuauccuauagggcaguugguugcccuuagccugaggcauuuaaugcacucgggaaguaccauauuucuuuagcuaucagaaaagguacauccaacuauuaaauacucguauugcu

SEQ ID NO: 444 - RNA, 107 nt, Artificial Sequence
  sgRNA guide nucleic acid
agggcaguugguugcccuuagccugaggcauuuaaugcacucgggaaguaccauauuucuuuagcuaucagaaaagguacauccaacuauuaaauacucguauugcu

SEQ ID NO: 445 - RNA, 107 nt, Artificial Sequence; identical to SEQ ID NO: 444
  sgRNA guide nucleic acid

SEQ ID NO: 446 - RNA, 102 nt, Artificial Sequence
  sgRNA guide nucleic acid
ggggcaguugguugcccuuagccugaggcauuuauugcacucgggaaguaccauuucuuguugaagaaaugguacauccaacuauuaaauacucguauugcu

SEQ ID NO: 447 - RNA, 131 nt, Artificial Sequence
  sgRNA guide nucleic acid
aagauaugaauaggaguauuccuauggggcaguugguugcccuuagccugagguauuuaaugcacucgggaaguacuuucaacaguauccguuagaaaagguacauccaacuauuaaauacucguauugcu

SEQ ID NO: 448 - RNA, 106 nt, Artificial Sequence
  sgRNA guide nucleic acid
ggggcaguugguugcccuuagccugagguauuuaaugcacucgggaaguacuuucaacaguauccguuagaaaagguacauccaacuauuaaauacucguauugcu

SEQ ID NO: 449 - RNA, 124 nt, Artificial Sequence
  sgRNA guide nucleic acid
aauaggauuuauccuauggggcaguuggaugcccuuagccugaggcauuuuuauugcacucgggaaguacuuucuaaauaacuaucagaaagagcacauccaacuauuaaauacucguauugcu

SEQ ID NO: 450 - RNA, 107 nt, Artificial Sequence
  sgRNA guide nucleic acid
ggggcaguuggaugcccuuagccugaggcauuuuuauugcacucgggaaguacuuucuaaauaacuaucagaaagagcacauccaacuauuaaauacucguauugcu

SEQ ID NO: 451 - RNA, 123 nt, Artificial Sequence
  sgRNA guide nucleic acid
auaggauuuauccuauggggcaguugguugcccuuagccugaggcauuuaaugcacucgggaaguaccuuuucucauugaguggcagaaaggguacauccaacuauuaaauacucguauugcu

SEQ ID NO: 452 - RNA, 107 nt, Artificial Sequence
  sgRNA guide nucleic acid
ggggcaguugguugcccuuagccugaggcauuuaaugcacucgggaaguaccuuuucucauugaguggcagaaaggguacauccaacuauuaaauacucguauugcu

SEQ ID NO: 453 - RNA, 124 nt, Artificial Sequence
  sgRNA guide nucleic acid
aauaggauuuauccuauggggcaguugguugcccuuagccugaggcauuuauugcacucgggaaguaccuuuuuucauugagcaacagaaaagguauauccaacuauuaaauacucguauugcu

SEQ ID NO: 454 - RNA, 107 nt, Artificial Sequence
  sgRNA guide nucleic acid
ggggcaguugguugcccuuagccugaggcauuuauugcacucgggaaguaccuuuuuucauugagcaacagaaaagguauauccaacuauuaaauacucguauugcu

SEQ ID NO: 455 - RNA, 123 nt, Artificial Sequence
  sgRNA guide nucleic acid
aauaggaauuauccuauggggcaguugguuguccuuagccugagguauuuauugcacucgggaaguacuuuuuacauuaacuaucagaaaggguacauccaacuauuaaauacucguauugcu

SEQ ID NO: 456 - RNA, 106 nt, Artificial Sequence
  sgRNA guide nucleic acid
ggggcaguugguuguccuuagccugagguauuuauugcacucgggaaguacuuuuuacauuaacuaucagaaaggguacauccaacuauuaaauacucguauugcu

SEQ ID NO: 457 - RNA, 134 nt, Artificial Sequence
  sgRNA guide nucleic acid
gaauaaugaagaauaggauucguccuauggggcaguugguugcccuuagccugaggaauuuaauucacucgggaaguacuuuucuuauugugugacagaaaggguacauccaacuauuaaauacucguauugcu

SEQ ID NO: 458 - RNA, 106 nt, Artificial Sequence
  sgRNA guide nucleic acid
ggggcaguugguugcccuuagccugaggaauuuaauucacucgggaaguacuuuucuuauugugugacagaaaggguacauccaacuauuaaauacucguauugcu

SEQ ID NO: 459 - RNA, 53 nt, Artificial Sequence
  crRNA guide nucleic acid
guugcaacuuacgcauagguguaaaauacgagguauuaaauacucguauugcu

SEQ ID NO: 460 - RNA, 123 nt, Artificial Sequence
  crRNA guide nucleic acid
agggcgacucggcguccuaaaaucgagaaaguguacauaaguauuuaacaaaauacgguaaauacucucgguaagguuuuaacgugcacauaauaauccgugcaacaggguuacacuuuuguu

SEQ ID NO: 461 - RNA, 52 nt, Artificial Sequence
  crRNA guide nucleic acid
guugcaauucguaugcgcagguaaguuucgaguauuaaauacucguauugcu

SEQ ID NO: 462 - RNA, 125 nt, Artificial Sequence
  crRNA guide nucleic acid
ggggcggcucggcgucccaaaaucgagaaaguauauguaaaucugaauuuauucaguaguagauacacucgauaagguauaaacaauacacauuuuaauccguguauugaacuuauuuagcuauu

SEQ ID NO: 463 - RNA, 97 nt, Artificial Sequence
  sgRNA guide nucleic acid
cgggcgggcuguaccgccuuaugcugagacuuuuucguacucggcaagucaccuaauguugaaaggcuacauacagcuauuaaauacucguauugcu

SEQ ID NO: 464 - RNA, 56 nt, Artificial Sequence
  crRNA guide nucleic acid
gguguaugugcaccauauauguaggugacauacagcuauuaaauacucguauugcu

SEQ ID NO: 465 - RNA, 59 nt, Artificial Sequence
  crRNA guide nucleic acid
uucgggugggcuguaccaccuuaagcggagggaauuuuccacuccgcaaguuaccuaua

SEQ ID NO: 466 - RNA, 96 nt, Artificial Sequence
  sgRNA guide nucleic acid
agggguagcuguuuacccugaaugugaggggcuauugcccacucauaaacuaccuuuugaaaaagguugauacagcuauuaaauacucguauugcu

SEQ ID NO: 467 - RNA, 98 nt, Artificial Sequence
  sgRNA guide nucleic acid
uggggcaguugguugcccuuagccugaggcauuuauugcacucgggaaguaccauuucucagaaaugguacauccaacaagucaagccuaaccagggc

SEQ ID NO: 468 - RNA, 124 nt, Artificial Sequence
  sgRNA guide nucleic acid
gggguuguuggaaacccuuaugcugagggauuauuccacucgguaaguaccuuaaauaguuauagaaagauguaaaucaucuauaaaagaaagguacauccaacgccuggaggcuauccagcgu

SEQ ID NO: 469 - RNA, 117 nt, Artificial Sequence
  sgRNA guide nucleic acid
augaauaggauucguccuauggggcaguugguugcccuuagccugaggcauuuauugcacucgggaaguaccauuucucagaaaugguacauccaaccgcuacucucucuuucuggc

SEQ ID NO: 470 - RNA, 117 nt, Artificial Sequence
  sgRNA guide nucleic acid
augaauaggauucguccuauggggcaguugguugcccuuagccugaggcauuuauugcacucgggaaguaccauuucucagaaaugguacauccaacaucucaucaggguacuccug

SEQ ID NO: 471 - RNA, 117 nt, Artificial Sequence
  sgRNA guide nucleic acid
augaauaggauucguccuauggggcaguugguugcccuuagccugaggcauuuauugcacucgggaaguaccauuucucagaaaugguacauccaacgauggaugaaacccagacac

SEQ ID NO: 472 - RNA, 117 nt, Artificial Sequence
  sgRNA guide nucleic acid
augaauaggauucguccuauggggcaguugguugcccuuagccugaggcauuuauugcacucgggaaguaccauuucucagaaaugguacauccaacaccagcuugacaucacagga

SEQ ID NO: 473 - RNA, 170 nt, Artificial Sequence
  sgRNA guide nucleic acid
aaacaagggcggcucaacguccuagaaucgagaaaguaugcguaagacuuauuuauugagcgguagauacucucgguaagguauaaauuccacaaugaaaauccuguggacaccguauaauaugugcauguuugaaacaugaggugugagagugggggugaauucagugu

SEQ ID NO: 474 - RNA, 170 nt, Artificial Sequence
  sgRNA guide nucleic acid
aaacaagggcggcucaacguccuagaaucgagaaaguaugcguaagacuuauuuauugagcgguagauacucucgguaagguauaaauuccacaaugaaaauccuguggacaccguauaauaugugcauguuugaaacaugaggugugagauagaucgagacauguaagc

SEQ ID NO: 475 - RNA, 170 nt, Artificial Sequence
  sgRNA guide nucleic acid
aaacaagggcggcucaacguccuagaaucgagaaaguaugcguaagacuuauuuauugagcgguagauacucucgguaagguauaaauuccacaaugaaaauccuguggacaccguauaauaugugcauguuugaaacaugaggugugagauccauccgacauugaaguu

SEQ ID NO: 476 - RNA, 99 nt, Artificial Sequence
  sgRNA guide nucleic acid
auggggcaguugguugcccuuagccugaggaauuuaauucacucgggaaguaccuuucucaugaaaugguacauccaacggggaggguuucucuuccgc

SEQ ID NO: 477 - RNA, 174 nt, Artificial Sequence
  sgRNA guide nucleic acid
aaacaagggcggcucaacguccuagaaucgagaaaguaugcguaagacuuauuuauugagcgguagauacucucgguaagguauaaauuccacaaugaaaauccuguggacaccguauaauaugugcauguuugaaaugugcaugaggugugaguggccuggaggcuauccagc

SEQ ID NO: 478 - RNA, 174 nt, Artificial Sequence
  sgRNA guide nucleic acid
aaacaagggcggcucaacguccuagaaucgagaaaguaugcguaagacuuauuuauugagcgguagauacucucgguaagguauaaauuccacaaugaaaauccuguggacaccguauaauaugugcauguuugaaaugugcaugaggugugagagugggggugaauucagugu

SEQ ID NO: 479 - RNA, 174 nt, Artificial Sequence; identical to SEQ ID NO: 478
  sgRNA guide nucleic acid

SEQ ID NO: 480 - RNA, 99 nt, Artificial Sequence
  sgRNA guide nucleic acid
auggggcaguugguugcccuuagccugaggaauuuaauucacucgggaaguaccuuucucaugaaaugguacauccaacacugcucggaccugcauuuu

SEQ ID NO: 481 - RNA, 99 nt, Artificial Sequence
  sgRNA guide nucleic acid
auggggcaguugguugcccuuagccugaggaauuuaauucacucgggaaguaccuuucucaugaaaugguacauccaaccugcuuuuacuauuaguggu

SEQ ID NO: 482 - RNA, 98 nt, Artificial Sequence
  sgRNA guide nucleic acid
uggggcaguugguugcccuuagccugaggcauuuauugcacucgggaaguaccauuucucagaaaugguacauccaacucugggcgcccgcuaaguuc

SEQ ID NO: 483 - RNA, 98 nt, Artificial Sequence
  sgRNA guide nucleic acid
uggggcaguugguugcccuuagccugaggcauuuauugcacucgggaaguaccauuucucagaaaugguacauccaacuucaggcgcccgcuaaguuc

SEQ ID NO: 484 - RNA, 98 nt, Artificial Sequence
  sgRNA guide nucleic acid
uggggcaguugguugcccuuagccugaggcauuuauugcacucgggaaguaccauuucucagaaaugguacauccaacucuaggcgccuacuaaguuc

SEQ ID NO: 485 - RNA, 98 nt, Artificial Sequence
  sgRNA guide nucleic acid
uggggcaguugguugcccuuagccugaggcauuuauugcacucgggaaguaccauuucucagaaaugguacauccaacucuaggcgcccgcuaaauuc

SEQ ID NO: 486 - RNA, 98 nt, Artificial Sequence
  sgRNA guide nucleic acid
uggggcaguugguugcccuuagccugaggcauuuauugcacucgggaaguaccauuucucagaaaugguacauccaacucuaggcauccgcuaaguuc

SEQ ID NO: 487 - RNA, 98 nt, Artificial Sequence
  sgRNA guide nucleic acid
uggggcaguugguugcccuuagccugaggcauuuauugcacucgggaaguaccauuucucagaaaugguacauccaacccuaggcgcccgcuaaguuc

SEQ ID NO: 488 - RNA, 98 nt, Artificial Sequence
  sgRNA guide nucleic acid
uggggcaguugguugcccuuagccugaggcauuuauugcacucgggaaguaccauuucucagaaaugguacauccaacucuagaugcccgcuaaguuc

SEQ ID NO: 489 - RNA, 98 nt, Artificial Sequence
  sgRNA guide nucleic acid
uggggcaguugguugcccuuagccugaggcauuuauugcacucgggaaguaccauuucucagaaaugguacauccaaccuuaggcgcccgcuaaguuc

SEQ ID NO: 490 - RNA, 98 nt, Artificial Sequence
  sgRNA guide nucleic acid
uggggcaguugguugcccuuagccugaggcauuuauugcacucgggaaguaccauuucucagaaaugguacauccaacucuaggcgcccgcuagauuc

SEQ ID NO: 491 - RNA, 98 nt, Artificial Sequence
  sgRNA guide nucleic acid
uggggcaguugguugcccuuagccugaggcauuuauugcacucgggaaguaccauuucucagaaaugguacauccaacucuaggcgcccgcuggguuc

SEQ ID NO: 492 - RNA, 98 nt, Artificial Sequence
  sgRNA guide nucleic acid
uggggcaguugguugcccuuagccugaggcauuuauugcacucgggaaguaccauuucucagaaaugguacauccaacucuaggcgccugcuaaguuc

SEQ ID NO: 493 - RNA, 98 nt, Artificial Sequence
  sgRNA guide nucleic acid
uggggcaguugguugcccuuagccugaggcauuuauugcacucgggaaguaccauuucucagaaaugguacauccaacucuaaacgcccgcuaaguuc

SEQ ID NO: 494 - RNA, 98 nt, Artificial Sequence
  sgRNA guide nucleic acid
uggggcaguugguugcccuuagccugaggcauuuauugcacucgggaaguaccauuucucagaaaugguacauccaacucuaggcgcccauuaaguuc

SEQ ID NO: 495 - RNA, 98 nt, Artificial Sequence
  sgRNA guide nucleic acid
uggggcaguugguugcccuuagccugaggcauuuauugcacucgggaaguaccauuucucagaaaugguacauccaacucuaggcgcccgccaaguuc

SEQ ID NO: 496 - RNA, 98 nt, Artificial Sequence
  sgRNA guide nucleic acid
uggggcaguugguugcccuuagccugaggcauuuauugcacucgggaaguaccauuucucagaaaugguacauccaacuccgggcgcccgcuaaguuc

SEQ ID NO: 497 - RNA, 98 nt, Artificial Sequence
  sgRNA guide nucleic acid
uggggcaguugguugcccuuagccugaggcauuuauugcacucgggaaguaccauuucucagaaaugguacauccaacuuuaggcgcccgcuaaguuc

SEQ ID NO: 498 - RNA, 98 nt, Artificial Sequence
  sgRNA guide nucleic acid
uggggcaguugguugcccuuagccugaggcauuuauugcacucgggaaguaccauuucucagaaaugguacauccaacucuaggcgcccgccgaguuc

SEQ ID NO: 499 - RNA, 98 nt, Artificial Sequence
  sgRNA guide nucleic acid
uggggcaguugguugcccuuagccugaggcauuuauugcacucgggaaguaccauuucucagaaaugguacauccaacucuaggcgcuugcuaaguuc

SEQ ID NO: 500 - RNA, 196 nt, Artificial Sequence
  sgRNA guide nucleic acid
uggggcaguugguugcccuuagccugaggcauuuauugcacucgggaaguaccauuucucagaaaugguacauccaacuccaggcgcccgcuaaguucuggggcaguugguugcccuuagccugaggcauuuauugcacucgggaaguaccauuucucagaaaugguacauccaacuccaggcgcccgcuaaguuc

SEQ ID NO: 501 - RNA, 98 nt, Artificial Sequence
  sgRNA guide nucleic acid
uggggcaguugguugcccuuagccugaggcauuuauugcacucgggaaguaccauuucucagaaaugguacauccaacucuaggcgcccgcuagguuc

SEQ ID NO: 502 - RNA, 98 nt, Artificial Sequence
  sgRNA guide nucleic acid
uggggcaguugguugcccuuagccugaggcauuuauugcacucgggaaguaccauuucucagaaaugguacauccaacucugagcgcccgcuaaguuc

SEQ ID NO: 503 - RNA, 98 nt, Artificial Sequence
  sgRNA guide nucleic acid
uggggcaguugguugcccuuagccugaggcauuuauugcacucgggaaguaccauuucucagaaaugguacauccaacucuaagcgcccgcuaaguuc

SEQ ID NO: 504 - RNA, 98 nt, Artificial Sequence
  sgRNA guide nucleic acid
uggggcaguugguugcccuuagccugaggcauuuauugcacucgggaaguaccauuucucagaaaugguacauccaacucuagacgcccgcuaaguuc

SEQ ID NO: 505 - RNA, 98 nt, Artificial Sequence
  sgRNA guide nucleic acid
uggggcaguugguugcccuuagccugaggcauuuauugcacucgggaaguaccauuucucagaaaugguacauccaacucuaggcgcccgcuaagccc

SEQ ID NO: 506 - RNA, 98 nt, Artificial Sequence
  sgRNA guide nucleic acid
uggggcaguugguugcccuuagccugaggcauuuauugcacucgggaaguaccauuucucagaaaugguacauccaacucuaggcgcccguuaaguuc

SEQ ID NO: 507 - RNA, 98 nt, Artificial Sequence
  sgRNA guide nucleic acid
uggggcaguugguugcccuuagccugaggcauuuauugcacucgggaaguaccauuucucagaaaugguacauccaacucuaggcacccgcuaaguuc

SEQ ID NO: 508 - RNA, 98 nt, Artificial Sequence
  sgRNA guide nucleic acid
uggggcaguugguugcccuuagccugaggcauuuauugcacucgggaaguaccauuucucagaaaugguacauccaacucuaggcgcccgcuaagcuc

SEQ ID NO: 509 - RNA, 98 nt, Artificial Sequence
  sgRNA guide nucleic acid
uggggcaguugguugcccuuagccugaggcauuuauugcacucgggaaguaccauuucucagaaaugguacauccaacucuaggcgcccgucaaguuc

SEQ ID NO: 510 - RNA, 98 nt, Artificial Sequence
  sgRNA guide nucleic acid
uggggcaguugguugcccuuagccugaggcauuuauugcacucgggaaguaccauuucucagaaaugguacauccaacucuaggcgcccacuaaguuc

SEQ ID NO: 511 - RNA, 98 nt, Artificial Sequence
  sgRNA guide nucleic acid
uggggcaguugguugcccuuagccugaggcauuuauugcacucgggaaguaccauuucucagaaaugguacauccaacucuaggugcccgcuaaguuc

SEQ ID NO: 512 - RNA, 98 nt, Artificial Sequence
  sgRNA guide nucleic acid
uggggcaguugguugcccuuagccugaggcauuuauugcacucgggaaguaccauuucucagaaaugguacauccaacucuaggcgcucgcuaaguuc

SEQ ID NO: 513 - RNA, 98 nt, Artificial Sequence
  sgRNA guide nucleic acid
uggggcaguugguugcccuuagccugaggcauuuauugcacucgggaaguaccauuucucagaaaugguacauccaacucuagguacccgcuaaguuc

SEQ ID NO: 514 - RNA, 98 nt, Artificial Sequence
  sgRNA guide nucleic acid
uggggcaguugguugcccuuagccugaggcauuuauugcacucgggaaguaccauuucucagaaaugguacauccaacucuaggcgcccgcugaguuc

SEQ ID NO: 515 - RNA, 98 nt, Artificial Sequence
  sgRNA guide nucleic acid
uggggcaguuggaugcccuuagccugaggcauuuauugcacucgggaaguaccauuucucagaaaugguacauccaacucuaggcgcccgcuaaguuc

SEQ ID NO: 516 - RNA, 95 nt, Artificial Sequence
  sgRNA guide nucleic acid
uggggcaguugguugcccuuagccugaggcauuuauugcacucgggaaguaccauuucucagaaaugguacauccaacucuaggcgcccgcuaag

SEQ ID NO: 517 - RNA, 85 nt, Artificial Sequence
  sgRNA guide nucleic acid
uggggcaguugguugcccuuagccugaggcauuuauugcacucgggaaguaccauuacauccaacucuaggcgcccgcuaaguuc

SEQ ID NO: 518 - RNA, 108 nt, Artificial Sequence
  sgRNA guide nucleic acid
uggggcaguugguugcccuuagccugaggcauuuauugcacucgggaaguaccauuucucagaaaugguacauccaacucuaggcgcccgcuaaguucgcauguccua

SEQ ID NO: 519 - RNA, 111 nt, Artificial Sequence
  sgRNA guide nucleic acid
aauaggauucguccuauggggcaguugguugcccuuagccugaggcauuuauugcacucgggaaguaccauugaaaaaugguacauccaacucuaggcgcccgcuaaguuc

SEQ ID NO: 520 - RNA, 105 nt, Artificial Sequence
  sgRNA guide nucleic acid
uggggcaguugguugcccuuagccugaggcauuuauugcacucgggaaguaccauuucucagaaaugguacauccaacucuaggcgcccgcuaaguucgcauguc

SEQ ID NO: 521 - RNA, 98 nt, Artificial Sequence
  sgRNA guide nucleic acid
uggggcaguugguugcccuuagccugaggcauuuauugcacucgggaaguaccauuucucagaaaugguacauccaacucuaggcguccgcuaaguuc

SEQ ID NO: 522 - RNA, 98 nt, Artificial Sequence
  sgRNA guide nucleic acid
uggggcaguugguugcccuuagccugaggcauuuauugcacucgggaaguaccauuucucagaaaugguacauccaacucuaggcgcccgcuaagucc

SEQ ID NO: 523 - RNA, 98 nt, Artificial Sequence
  sgRNA guide nucleic acid
uggggcaguugguugcccuuagccugaggcauuuauugcacucgggaaguaccauuucucagaaaugguacauccaacucuaggcgcccgcuaagucu

SEQ ID NO: 524 - RNA, 107 nt, Artificial Sequence
  sgRNA guide nucleic acid
uggggcaguugguugcccuuagccugaggcauuuauugcacucgggaaguaccauuucucagaaaugguacauccaacucuaggcgcccgcuaaguucgcauguccu

SEQ ID NO: 525 - RNA, 98 nt, Artificial Sequence
  sgRNA guide nucleic acid
uggggcaguugguugcccuuagccugaggcauuuauugcacucgggaagugccauuucucagaaaugguacauccaacucuaggcgcccgcuaaguuc

SEQ ID NO: 526 - RNA, 114 nt, Artificial Sequence
  sgRNA guide nucleic acid
aauaggauucguccuauggggcaguugguugcccuuagccugaggcauuuauugcacucgggaaguaccauuucucagaaaugguacauccaacucuaggcgcccgcuaaguuc

SEQ ID NO: 527 - RNA, 106 nt, Artificial Sequence
  sgRNA guide nucleic acid
uggggcaguugguugcccuuagccugaggcauuuauugcacucgggaaguaccauuucucagaaaugguacauccaacucuaggcgcccgcuaaguucgcaugucc

SEQ ID NO: 528 - RNA, 98 nt, Artificial Sequence
  sgRNA guide nucleic acid
uggggcaguugguugcccuuagccugaggcauuuaaugcacucgggaaguaccauuucucagaaaugguacauccaacucuaggcgcccgcuaaguuc

SEQ ID NO: 529 - RNA, 104 nt, Artificial Sequence
  sgRNA guide nucleic acid
uggggcaguugguugcccuuagccugaggcauuuauugcacucgggaaguaccauuucucagaaaugguacauccaacucuaggcgcccgcuaaguucgcaugu

SEQ ID NO: 530 - RNA, 113 nt, Artificial Sequence
  sgRNA guide nucleic acid
aauaggauucguccuauggggcaguugguugcccuuagccugaggcauuuauugcacucgggaaguaccauuugaaaaaaugguacauccaacucuaggcgcccgcuaaguuc

SEQ ID NO: 531 - RNA, 101 nt, Artificial Sequence
  sgRNA guide nucleic acid
uggggcaguugguugcccuuagccugaggcauuuauugcacucgggaaguaccauuucucagaaaugguacauccaacucuaggcgcccgcuaaguucgca

SEQ ID NO: 532 - RNA, 107 nt, Artificial Sequence
  sgRNA guide nucleic acid
aauaggauucguccuauggggcaguugguugcccuuagccugaggcauuuauugcacucgggaaguaccagaaaugguacauccaacucuaggcgcccgcuaaguuc

SEQ ID NO: 533 - RNA, 98 nt, Artificial Sequence
  sgRNA guide nucleic acid
uggggcaguugguugcccuuagccugaggcauuuauugcacucgggaaguaccauuucucagaaaugguacauccaacucuaggcgcccgcuaaguuu

SEQ ID NO: 534 - RNA, 100 nt, Artificial Sequence
  sgRNA guide nucleic acid
uggggcaguugguugcccuuagccugaggcauuuauugcacucgggaaguaccauuucucagaaaugguacauccaacucuaggcgcccgcuaaguucgc

SEQ ID NO: 535 - RNA, 95 nt, Artificial Sequence
  sgRNA guide nucleic acid
uggggcaguugguugcccuuagccugaggcauuuauugcacucgggaaguaccauugaaaaaugguacauccaacucuaggcgcccgcuaaguuc

SEQ ID NO: 536 - RNA, 97 nt, Artificial Sequence
  sgRNA guide nucleic acid
uggggcaguugguugcccuuagccugaggcauuuauugcacucgggaaguaccauuugaaaaaaugguacauccaacucuaggcgcccgcuaaguuc

SEQ ID NO: 537 - RNA, 115 nt, Artificial Sequence
  sgRNA guide nucleic acid
aauaggauucguccuauggggcaguugguugcccuuagccugaggcauuuauugcacucgggaaguaccauuucgaaagaaaugguacauccaacucuaggcgcccgcuaaguuc

SEQ ID NO: 538 - RNA, 91 nt, Artificial Sequence
  sgRNA guide nucleic acid
uggggcaguugguugcccuuagccugaggcauuuauugcacucgggaaguaccagaaaugguacauccaacucuaggcgcccgcuaaguuc

SEQ ID NO: 539 - RNA, 99 nt, Artificial Sequence
  sgRNA guide nucleic acid
uggggcaguugguugcccuuagccugaggcauuuauugcacucgggaaguaccauuucucagaaaugguacauccaacucuaggcgcccgcuaaguucg

SEQ ID NO: 540 - RNA, 98 nt, Artificial Sequence
  sgRNA guide nucleic acid
uggggcaguugguugcccuuagccugaggcauuuauugcacucgggaaguacuauuucucagaaaugguacauccaacucuaggcgcccgcuaaguuc

SEQ ID NO: 541 - RNA, 103 nt, Artificial Sequence
  sgRNA guide nucleic acid
uggggcaguugguugcccuuagccugaggcauuuauugcacucgggaaguaccauuucucagaaaugguacauccaacucuaggcgcccgcuaaguucgcaug

SEQ ID NO: 542 - RNA, 99 nt, Artificial Sequence
  sgRNA guide nucleic acid
uggggcaguugguugcccuuagccugaggcauuuauugcacucgggaaguaccauuucgaaagaaaugguacauccaacucuaggcgcccgcuaaguuc

SEQ ID NO: 543 - RNA, 98 nt, Artificial Sequence
  sgRNA guide nucleic acid
uggggcaguugguugcccuuagccugaggcauuuauugcacucgggaaguaccauuucucagaaaugguauauccaacucuaggcgcccgcuaaguuc

SEQ ID NO: 544 - RNA, 102 nt, Artificial Sequence
  sgRNA guide nucleic acid
uggggcaguugguugcccuuagccugaggcauuuauugcacucgggaaguaccauuucucagaaaugguacauccaacucuaggcgcccgcuaaguucgcau

SEQ ID NO: 545 - RNA, 109 nt, Artificial Sequence
  sgRNA guide nucleic acid
aauaggauucguccuauggggcaguugguugcccuuagccugaggcauuuauugcacucgggaaguaccaugaaaaugguacauccaacucuaggcgcccgcuaaguuc

SEQ ID NO: 546 - RNA, 97 nt, Artificial Sequence
  sgRNA guide nucleic acid
uggggcaguugguugcccuuagccugaggcauuuauugcacucgggaaguaccauuucucagaaaugguacauccaacucuaggcgcccgcuaaguu

SEQ ID NO: 547 - RNA, 98 nt, Artificial Sequence
  sgRNA guide nucleic acid
uggggcaguugguugcccuuagccugaggaauuuauuucacucgggaaguaccauuucucagaaaugguacauccaacucuaggcgcccgcuaaguuc

SEQ ID NO: 548 - RNA, 93 nt, Artificial Sequence
  sgRNA guide nucleic acid
uggggcaguugguugcccuuagccugaggcauuuauugcacucgggaaguaccaugaaaaugguacauccaacucuaggcgcccgcuaaguuc

SEQ ID NO: 549 - RNA, 96 nt, Artificial Sequence
  sgRNA guide nucleic acid
uggggcaguugguugcccuuagccugaggcauuuauugcacucgggaaguaccauuucucagaaaugguacauccaacucuaggcgcccgcuaagu

SEQ ID NO: 550 - RNA, 57 nt, Artificial Sequence
  crRNA guide nucleic acid
guugcagaacccgaauagacgaaugaaggaaugcaacugaacgcguggaggggcgcu

SEQ ID NO: 551 - RNA, 57 nt, Artificial Sequence
  crRNA guide nucleic acid
guugcagaacccgaauagacgaaugaaggaaugcaacuucccaucacaugucacuuu

SEQ ID NO: 552 - RNA, 57 nt, Artificial Sequence
  crRNA guide nucleic acid
guugcagaacccgaauagacgaaugaaggaaugcaaccuauuaguggucguuuuuuu

SEQ ID NO: 553 - RNA, 57 nt, Artificial Sequence
  crRNA guide nucleic acid
guugcagaacccgaauagacgaaugaaggaaugcaacucggggggcgggggggagaa

SEQ ID NO: 554 - RNA, 57 nt, Artificial Sequence
  crRNA guide nucleic acid
guugcagaacccgaauagacgaaugaaggaaugcaaccagacuggccccagagaugc

SEQ ID NO: 555 - RNA, 57 nt, Artificial Sequence
  crRNA guide nucleic acid
guugcagaacccgaauagacgaaugaaggaaugcaacuucuguugauuugucggggg

SEQ ID NO: 556 - RNA, 56 nt, Artificial Sequence
  crRNA guide nucleic acid
gcugucaguaguaguaaaaauggggguacauccaacacaucuuucugugugccaag

SEQ ID NO: 557 - RNA, 56 nt, Artificial Sequence
  crRNA guide nucleic acid
gcugucaguaguaguaaaaauggggguacauccaaccagccaaaaggcaugcgcuc

SEQ ID NO: 558 - RNA, 98 nt, Artificial Sequence
  sgRNA guide nucleic acid
uggggcaguugguugcccuuagccugaggcauuuauugcacucgggaaguaccauuucucagaaaugguacauccaacauaagcgucagagcgccgag

SEQ ID NO: 559 - RNA, 98 nt, Artificial Sequence
  sgRNA guide nucleic acid
uggggcaguugguugcccuuagccugaggcauuuauugcacucgggaaguaccauuucucagaaaugguacauccaacucccaaaggcgcggcgcuga

SEQ ID NO: 560 - RNA, 98 nt, Artificial Sequence
  sgRNA guide nucleic acid
uggggcaguugguugcccuuagccugaggcauuuauugcacucgggaaguaccauuucucagaaaugguacauccaacagaaaacggaaacccagaag

SEQ ID NO: 561 - RNA, 98 nt, Artificial Sequence
  sgRNA guide nucleic acid
uggggcaguugguugcccuuagccugaggcauuuauugcacucgggaaguaccauuucucagaaaugguacauccaaccuuugcagacuggccccaga

SEQ ID NO: 562 - RNA, 99 nt, Artificial Sequence
  sgRNA guide nucleic acid
auggggcaguugguugcccuuagccugaggcauuuaaugcacucgggaaguaccuuuucucagaaaugguacauccaacauaagcgucagagcgccgag

SEQ ID NO: 563 - RNA, 99 nt, Artificial Sequence
  sgRNA guide nucleic acid
auggggcaguugguugcccuuagccugaggcauuuaaugcacucgggaaguaccuuuucucagaaaugguacauccaaccggggccucuggcuccccca

SEQ ID NO: 564 - RNA, 99 nt, Artificial Sequence
  sgRNA guide nucleic acid
auggggcaguugguugcccuuagccugaggcauuuaaugcacucgggaaguaccuuuucucagaaaugguacauccaacucccaaaggcgcggcgcuga

SEQ ID NO: 565 - RNA, 99 nt, Artificial Sequence
  sgRNA guide nucleic acid
auggggcaguugguugcccuuagccugaggcauuuaaugcacucgggaaguaccuuuucucagaaaugguacauccaaccauguccuagcaccucuggg

SEQ ID NO: 566 - RNA, 99 nt, Artificial Sequence
  sgRNA guide nucleic acid
auggggcaguugguugcccuuagccugaggcauuuaaugcacucgggaaguaccuuuucucagaaaugguacauccaaccgugcuguuuccuccccacg

SEQ ID NO: 567 - RNA, 99 nt, Artificial Sequence
  sgRNA guide nucleic acid
auggggcaguugguugcccuuagccugaggcauuuaaugcacucgggaaguaccuuuucucagaaaugguacauccaacgggggcgggggggagaaaaa

SEQ ID NO: 568 - RNA, 99 nt, Artificial Sequence
  sgRNA guide nucleic acid
auggggcaguugguugcccuuagccugaggcauuuaaugcacucgggaaguaccuuuucucagaaaugguacauccaacagaaaacggaaacccagaag

SEQ ID NO: 569 - RNA, 99 nt, Artificial Sequence
  sgRNA guide nucleic acid
auggggcaguugguugcccuuagccugaggcauuuaaugcacucgggaaguaccuuuucucagaaaugguacauccaaccuuugcagacuggccccaga

SEQ ID NO: 570 - RNA, 99 nt, Artificial Sequence
  sgRNA guide nucleic acid
auggggcaguugguugcccuuagccugaggaauuuaauucacucgggaaguaccuuucucaugaaaugguacauccaacacuggcuggggcaccauuag

SEQ ID NO: 571 - RNA, 99 nt, Artificial Sequence
  sgRNA guide nucleic acid
auggggcaguugguugcccuuagccugaggaauuuaauucacucgggaaguaccuuucucaugaaaugguacauccaacaagucaagccuaaccagggc

SEQ ID NO: 572 - RNA, 99 nt, Artificial Sequence
  sgRNA guide nucleic acid
auggggcaguugguugcccuuagccugaggaauuuaauucacucgggaaguaccuuucucaugaaaugguacauccaacguggucguuuuuuucucccc

SEQ ID NO: 573 - RNA, 99 nt, Artificial Sequence
  sgRNA guide nucleic acid
auggggcaguugguugcccuuagccugaggaauuuaauucacucgggaaguaccuuucucaugaaaugguacauccaacauuugucggggggcgggggg

SEQ ID NO: 574 - RNA, 99 nt, Artificial Sequence
  sgRNA guide nucleic acid
auggggcaguugguugcccuuagccugaggcauuuaaugcacucgggaaguaccuuuucucagaaaugguacauccaacacuggcuggggcaccauuag

SEQ ID NO: 575 - RNA, 99 nt, Artificial Sequence
  sgRNA guide nucleic acid
auggggcaguugguugcccuuagccugaggcauuuaaugcacucgggaaguaccuuuucucagaaaugguacauccaaccugcuuuuacuauuaguggu

SEQ ID NO: 576 - RNA, 99 nt, Artificial Sequence
  sgRNA guide nucleic acid
auggggcaguugguugcccuuagccugaggcauuuaaugcacucgggaaguaccuuuucucagaaaugguacauccaacucuuccgccauagauaacua

SEQ ID NO: 577 - RNA, 99 nt, Artificial Sequence
  sgRNA guide nucleic acid
auggggcaguugguugcccuuagccugaggcauuuaaugcacucgggaaguaccuuuucucagaaaugguacauccaacguggucguuuuuuucucccc

SEQ ID NO: 578 - RNA, 99 nt, Artificial Sequence; identical to SEQ ID NO: 577
  sgRNA guide nucleic acid

SEQ ID NO: 579 - RNA, 99 nt, Artificial Sequence
  sgRNA guide nucleic acid
auggggcaguugguugcccuuagccugaggcauuuaaugcacucgggaaguaccuuuucucagaaaugguacauccaacauuugucggggggcgggggg

SEQ ID NO: 580 - RNA, 99 nt, Artificial Sequence
  sgRNA guide nucleic acid
auggggcaguugguugcccuuagccugaggcauuuaaugcacucgggaaguaccuuuucucagaaaugguacauccaacguuggccaggcuggucuuga

SEQ ID NO: 581 - RNA, 99 nt, Artificial Sequence
  sgRNA guide nucleic acid
auggggcaguuggaugcccuuagccugaggcauuuauugcacucgggaaguaccuuuucucagaaaugguacauccaaccggggccucuggcuccccca

SEQ ID NO: 582 - RNA, 99 nt, Artificial Sequence
  sgRNA guide nucleic acid
auggggcaguuggaugcccuuagccugaggcauuuauugcacucgggaaguaccuuuucucagaaaugguacauccaacucccaaaggcgcggcgcuga

SEQ ID NO: 583 - RNA, 99 nt, Artificial Sequence
  sgRNA guide nucleic acid
auggggcaguuggaugcccuuagccugaggcauuuauugcacucgggaaguaccuuuucucagaaaugguacauccaaccccggguaagccugucugcu

SEQ ID NO: 584 - RNA, 99 nt, Artificial Sequence
  sgRNA guide nucleic acid
auggggcaguuggaugcccuuagccugaggcauuuauugcacucgggaaguaccuuuucucagaaaugguacauccaacagaaaacggaaacccagaag

SEQ ID NO: 585 - RNA, 99 nt, Artificial Sequence
  sgRNA guide nucleic acid
auggggcaguuggaugcccuuagccugaggcauuuauugcacucgggaaguaccuuuucucagaaaugguacauccaaccuuugcagacuggccccaga

SEQ ID NO: 586 - RNA, 99 nt, Artificial Sequence
  sgRNA guide nucleic acid
auggggcaguuggaugcccuuagccugaggcauuuauugcacucgggaaguaccuuuucucagaaaugguacauccaacgcgcccuccgaucuggggug

SEQ ID NO: 587 - RNA, 99 nt, Artificial Sequence
  sgRNA guide nucleic acid
auggggcaguuggaugcccuuagccugaggcauuuauugcacucgggaaguaccuuuucucagaaaugguacauccaaccauguccuagcaccucuggg

SEQ ID NO: 588 - RNA, 99 nt, Artificial Sequence
  sgRNA guide nucleic acid
auggggcaguuggaugcccuuagccugaggcauuuauugcacucgggaaguaccuuuucucagaaaugguacauccaacgggggcgggggggagaaaaa

SEQ ID NO: 589 - RNA, 56 nt, Artificial Sequence
  sgRNA guide nucleic acid
guuguagucgaccugaaucuguggggugcuuacagggagcaguuaacuggcugggg

SEQ ID NO: 590 - RNA, 56 nt, Artificial Sequence
  sgRNA guide nucleic acid
guuguagucgaccugaaucuguggggugcuuacaggagagaugcuaagugacuugc

SEQ ID NO: 591 - RNA, 56 nt, Artificial Sequence
  crRNA guide nucleic acid
guuguagucgaccugaaucuguggggugcuuacaggcagagaugcuaagugacuug

SEQ ID NO: 592 - RNA, 52 nt, Artificial Sequence
  crRNA guide nucleic acid
gauauaucuuguaugcauauguagguugugaguuguaucccuucaggaaaaa

SEQ ID NO: 593 - RNA, 52 nt, Artificial Sequence
  crRNA guide nucleic acid
guugcaaugaacguaugugcaugaggugugaggcggggccucuggcuccccc

SEQ ID NO: 594 - RNA, 52 nt, Artificial Sequence
  crRNA guide nucleic acid
guugcaaugaacguaugugcaugaggugugagaucugugagaggcagaagau

SEQ ID NO: 595 - RNA, 57 nt, Artificial Sequence
  crRNA guide nucleic acid
guugcagaacccgaauagacgaaugaaggaaugcaacgaaaguucugugccaagaag

SEQ ID NO: 596 - RNA, 57 nt, Artificial Sequence
  crRNA guide nucleic acid
guugcagaacccgaauagacgaaugaaggaaugcaacgccuacggcgacgggagggu

SEQ ID NO: 597 - RNA, 57 nt, Artificial Sequence
  crRNA guide nucleic acid
guugcagaacccgaauagacgaaugaaggaaugcaacaaugcuaccuagcagaagga

SEQ ID NO: 598 - RNA, 56 nt, Artificial Sequence
  crRNA guide nucleic acid
gaugugaacgaccuuuuuuugcgguguacuucgagguauuaaauacucguauugcu

SEQ ID NO: 599 - RNA, 164 nt, Artificial Sequence
  crRNA guide nucleic acid
uauugucgccgauaagguugcgauagccuacgggcaacugcgcaacuggcggcgauaggccgacucgaacggccugaaggggccuuacggccugaaaaugagaaggcacauauaagagaaaauucguuuuccguuguguucgcucuauccaauacacgcaaauu

SEQ ID NO: 600 - RNA, 56 nt, Artificial Sequence
  crRNA guide nucleic acid
gcugcacugcaccgcccauugauggugugcucuagguauuaaauacucguauugcu

SEQ ID NO: 601 - RNA, 155 nt, Artificial Sequence
  crRNA guide nucleic acid
accgaggccgcgaaaaacacaacgcuagccgaaaggcaaucgcgggugcgcggccgaaggccgacuagagcggccugaagguugagaagcgugcauguaaacggcagaaaaaaugccuuuuguacgcgcucaccgaacacgucugagcgguuuuu

SEQ ID NO: 602 - RNA, 149 nt, Artificial Sequence
  sgRNA guide nucleic acid
ggccgaccuguacggccugaaggaugagaaggcacauauaaguggaaaauugcuucccguuguguucgcucaccagguacuccuuaauugaaagcugcaagagcuccuaauuugaggggugcauacagguauuaaauacucguauugcu

SEQ ID NO: 603 - RNA, 216 nt, Artificial Sequence
  sgRNA guide nucleic acid
aguaugaggccgccgauaaacguuucgcuagccugacaggcaaucgcgaacgggcggcugaaggccgaccuguacggccugaaggaugagaaggcacauauaaguggaaaauugcuucccguuguguucgcucaccagguacuccuuaauuuuuuugaaagcugcaagagcuccuaauuugaggggugcauacagguauuaaauacucguauugcu

SEQ ID NO: 604 - RNA, 203 nt, Artificial Sequence
  crRNA guide nucleic acid
ugaaauauugauugaggucgccguuuacguugcgucacaagggcgcgcgggcgaccgaaggccgaucuguacggccugcagguugagaaggcacauauuagaggaaaauugcuucccuuuguguucgcucaccgaguauuccuuguuuuuugcggcaagaaacugucuuaauuguuuucuggggcagaaguuacagcccaaca

SEQ ID NO: 605 - RNA, 176 nt, Artificial Sequence
  sgRNA guide nucleic acid
uauugcgcuagccauaauggcaaucgcguacaggcaacugaaggccgaccuguacggccuuaagguugagaaggcacauguaaguggaaaaaugcuuucccguuguguucgcucaccaagcacacacguuuuuuugaaauguggggugcuuacagguauuaaauacucguauugcu

SEQ ID NO: 606 - RNA, 137 nt, Artificial Sequence
  sgRNA guide nucleic acid
gaaggccgaccuguacggccuuaagguugagaaggcacauguaaguggaaaaaugcuuucccguuguguucgcucaccaagcacacacguuuuuuugaaauguggggugcuuacagguauuaaauacucguauugcu

SEQ ID NO: 607 - DNA, 95 bp, Artificial Sequence
  crRNA guide nucleic acid
aaggccgacctgtacggccttaaggttgagaaggcacatgtcagtggaaaaatgctttccctttgtgttcgctcaccaagcacacgcggtttttt

SEQ ID NO: 608 - DNA, 222 bp, Artificial Sequence
  crRNA guide nucleic acid
atgaggttcattgaaaagttaactgaggttgtcgtaaatgttgcgctagccataatggcaatcgcgtacaggcaactgaaggccgacctgtacggccttaaggttgagaaggcacatgtcagtggaaaaatgctttccctttgtgttcgctcaccaagcacacgcggtttttttaatgcaataattgcttcaaaggcctgtaaaataatgatttacaacgaa

SEQ ID NO: 609 - DNA, 226 bp, Artificial Sequence
  crRNA guide nucleic acid
atgctcattgaaaagttaaatgaggtcgccatcaatgtttcgctaacctttaaggtaatcgcgggcaggcgactgaaggccgacctgtacggccttaaggctgagaaggcacatgtaagtggaaaaatgctttcccgttgtgttcgctcaccaagcacatttgtttttttaatgcagttattgctccaacagcctgtaaaatctccagttacaacagatagggttg

SEQ ID NO: 610 - RNA, 107 nt, Artificial Sequence
  sgRNA guide nucleic acid
ggggcaguugguugcccuuagccugaggcauuuauugcacucgggaaguaccauuuccaauuaaacaacagaaaugguacauccaacuauuaaauacucguauugcu

SEQ ID NO: 611 - DNA, 96 bp, Artificial Sequence
  crRNA guide nucleic acid
gaaggccgacctgtacggccttaaggttgagaaggcacatgtaagtggaaaaatgctttcccgttgtgttcgctcaccaagcacacacgttttttt

SEQ ID NO: 612 - RNA, 186 nt, Artificial Sequence
  sgRNA guide nucleic acid
aacugccgguaagauuacgauagccgaaaggcaauugcguaugcggcaguuaaggccggcucgaacggccugaagguugaguuuaaagucacauauaagcggaaaaaucagauuucccauuguguucgcucaccaauacgcgcaaauuugaaaauguaguucgagguauuaaauacucguauugcu

SEQ ID NO: 613 - RNA, 103 nt, Artificial Sequence
  cr/sgRNA guide nucleic acid
ggggcaguuggaugcccuuaugcugagggauuauuccacucggcaaguaccaauaauaauggaugugaaaagguacauccaacuauuaaauacucguauugcu

SEQ ID NO: 614 - RNA, 106 nt, Artificial Sequence
  cr/sgRNA guide nucleic acid
cgggugguugcacauccgaagggugaggauuuuuucacucacuaauacuacaaauggaaaaauuuaaaggaaaauguaaaugcaacuauuaaauacucguauugcu

SEQ ID NO: 615 - RNA, 201 nt, Artificial Sequence
  sgRNA guide nucleic acid
uauugucgccgauaagguugcgauagccuacgggcaacugcgcaacuggcggcgauaggccgacucgaacggccugaaggggccuuacggccugaaaaugagaaggcacauauaagagaaaauucguuuuccguuguguucgcucuauccaauacacgcaaauugaaaguguacuucgagguauuaaauacucguauugcu

SEQ ID NO: 616 - RNA, 124 nt, Artificial Sequence
  sgRNA guide nucleic acid
gggguuguuggaaacccuuaugcugagggauuauuccacucgguaaguaccuuaaauaguuauagaaagauguaaaucaucuauaaaagaaagguacauccaaccucaugacgcugcggcugug

SEQ ID NO: 617 - RNA, 56 nt, Artificial Sequence
  crRNA guide nucleic acid
gcuguaagucauggaaaaauggugaguacauccaacuauuaaauacucguauugcu

SEQ ID NO: 618 - RNA, 80 nt, Artificial Sequence
  crRNA guide nucleic acid
auaggaauuauccuauggggcaguugguuguccuuagccugaggcauuuauugcacucgggaaguacuuucgacauuaac

SEQ ID NO: 619 - RNA, 67 nt, Artificial Sequence
  crRNA guide nucleic acid
uauggggcaguugguuguccuuagccugaggcauuuauugcacucgggaaguacuuucgacauuaac

SEQ ID NO: 620 - RNA, 122 nt, Artificial Sequence
  sgRNA guide nucleic acid
auaggaauuauccuauggggcaguugguuguccuuagccugaggcauuuauugcacucgggaaguacuuucgacauuaacgaaaauggugaguacauccaacuauuaaauacucguauugcu

SEQ ID NO: 621 - RNA, 109 nt, Artificial Sequence
  sgRNA guide nucleic acid
uauggggcaguugguuguccuuagccugaggcauuuauugcacucgggaaguacuuucgacauuaacgaaaauggugaguacauccaacuauuaaauacucguauugcu

SEQ ID NO: 622 - RNA, 61 nt, Artificial Sequence
  TracrRNA guide nucleic acid
uggggcaguugguugcccuuagccugaggcauuuauugcacucgggaaguaccauuucuca

SEQ ID NO: 623 - skipped

SEQ ID NO: 624 - RNA, 13 nt, Artificial Sequence
  Repeat sequence guide nucleic acid
ugguauauccaac

SEQ ID NO: 625 - RNA, 20 nt, Artificial Sequence
  Spacer sequence guide nucleic acid
gugccuuaguuucuucaucu

SEQ ID NO: 626 - RNA, 98 nt, Artificial Sequence
  sgRNA guide nucleic acid
uggggcaguugguugcccuuagccugaggcauuuauugcacucgggaaguaccauuucucagaaaugguauauccaacgugccuuaguuucuucaucu

SEQ ID NO: 627 - RNA, 55 nt, Artificial Sequence
  TracrRNA guide nucleic acid
uggggcaguugguugcccuuagccugaggcauuuauugcacucgggaaguaccau

SEQ ID NO: 628 - RNA, 10 nt, Artificial Sequence
  Repeat Sequence guide nucleic acid
uacauccaac

SEQ ID NO: 629 - RNA, 20 nt, Artificial Sequence
  Spacer sequence
ucuaggcgcccgcuaaguuc

SEQ ID NO: 630 - RNA, 13 nt, Artificial Sequence
  Repeat Sequence guide nucleic acid
ugguacauccaac

SEQ ID NO: 631 - RNA, 20 nt, Artificial Sequence
  Spacer sequence
cgugcuguuuccuccccaca

SEQ ID NO: 632 - RNA, 98 nt, Artificial Sequence
  sgRNA guide nucleic acid
uggggcaguugguugcccuuagccugaggcauuuauugcacucgggaaguaccauuucucagaaaugguacauccaaccgugcuguuuccuccccaca

SEQ ID NO: 633 - RNA, 48 nt, Artificial Sequence
  TracrRNA guide nucleic acid
auggggcaguugguugcccuuagccugaggcauuuaaugcacucggga

SEQ ID NO: 634 - skipped

SEQ ID NO: 635 - RNA, 20 nt, Artificial Sequence
  Spacer sequence
cgugcuguuuccuccccacg

SEQ ID NO: 636 - RNA, 75 nt, Artificial Sequence
  sgRNA guide nucleic acid
auggggcaguugguugcccuuagccugaggcauuuaaugcacucgggagaaaaaccgugcuguuuccuccccacg

SEQ ID NO: 637 - RNA, 54 nt, Artificial Sequence
  TracrRNA guide nucleic acid
auggggcaguugguugcccuuagccugaggcauuuaaugcacucgggaaguacc

SEQ ID NO: 638 - skipped

SEQ ID NO: 639 - RNA, 85 nt, Artificial Sequence
  sgRNA guide nucleic acid
auggggcaguugguugcccuuagccugaggcauuuaaugcacucgggaaguaccgaaaauccaaccgugcuguuuccuccccacg

SEQ ID NO: 640 - RNA, 62 nt, Artificial Sequence
  TracrRNA guide nucleic acid
auggggcaguugguugcccuuagccugaggcauuuaaugcacucgggaaguaccuuuucuca

SEQ ID NO: 641 - RNA, 13 nt, Artificial Sequence
  Repeat Sequence guide nucleic acid
agguacauccaac

SEQ ID NO: 642 - RNA, 99 nt, Artificial Sequence
  sgRNA guide nucleic acid
auggggcaguugguugcccuuagccugaggcauuuaaugcacucgggaaguaccuuuucucagaaaagguacauccaaccgugcuguuuccuccccacg

SEQ ID NO: 643 - skipped

SEQ ID NO: 644 - RNA, 91 nt, Artificial Sequence
  sgRNA guide nucleic acid
auggggcaguugguugcccuuagccugaggcauuuaaugcacucgggaaguaccuuuucucagaaaccaacucuaggcgcccgcuaaguuc

SEQ ID NO: 645 - RNA, 78 nt, Artificial Sequence
  Repeat Sequence guide nucleic acid
uggggcaguugguugcccuuagccugaggcauuuauugcacucgggaaguaccauuucucagaaaugguacauccaac

SEQ ID NO: 646 - RNA, 79 nt, Artificial Sequence
  Repeat Sequence guide nucleic acid
auggggcaguugguugcccuuagccugaggaauuuaauucacucgggaaguaccuuucucaugaaaugguacauccaac

SEQ ID NO: 647 - RNA, 20 nt, Artificial Sequence
  CasM.19952
ccccccacuccccgcugcug

SEQ ID NO: 648 - RNA, 20 nt, Artificial Sequence
  CasM.19952
aaguggcauccucucugagc

SEQ ID NO: 649 - RNA, 20 nt, Artificial Sequence
  CasM.19952
cuuccucgucugcagccaca

SEQ ID NO: 650 - RNA, 20 nt, Artificial Sequence
  CasM.19952
acuuuuccuguuuucucucu

SEQ ID NO: 651 - RNA, 20 nt, Artificial Sequence
  CasM.19952
gguuccucggugacccuaga

SEQ ID NO: 652 - RNA, 20 nt, Artificial Sequence
  CasM.19952
gugacccuagaaauuggagc

SEQ ID NO: 653 - RNA, 20 nt, Artificial Sequence
  CasM.19952
ucugcagccacagaauaugg

SEQ ID NO: 654 - RNA, 20 nt, Artificial Sequence
  CasM.19952
aggagccacagagcauugag

SEQ ID NO: 655 - RNA, 20 nt, Artificial Sequence
  CasM.19952
gaggagggcgggagacgagc

SEQ ID NO: 656 - RNA, 20 nt, Artificial Sequence
  CasM.19952
ucucccgcccuccuccgaca

SEQ ID NO: 657 - RNA, 20 nt, Artificial Sequence
  CasM.19952
ccaguuagagacuccgcgga

SEQ ID NO: 658 - RNA, 20 nt, Artificial Sequence
  CasM.19952
cucugaucuagaccuaguua

SEQ ID NO: 659 - RNA, 20 nt, Artificial Sequence
  CasM.19952
cgccggaaguaggacagagg

SEQ ID NO: 660 - RNA, 20 nt, Artificial Sequence
  CasM.19952
aaaggagcgaggacucuuca

SEQ ID NO: 661 - RNA, 20 nt, Artificial Sequence
  CasM.19952
cuccuuucgauuucuugucc

SEQ ID NO: 662 - RNA, 20 nt, Artificial Sequence
  CasM.19952
auuucuuguccugacacugg

SEQ ID NO: 663 - RNA, 20 nt, Artificial Sequence
  CasM.19952
gaacaaggcaaaggcuauaa

SEQ ID NO: 664 - RNA, 20 nt, Artificial Sequence
  CasM.19952
aguuauaauaguguguggac

SEQ ID NO: 665 - RNA, 20 nt, Artificial Sequence
  CasM.19952
aauauuaguguacuuuagac

SEQ ID NO: 666 - RNA, 20 nt, Artificial Sequence
  CasM.19952
uugagccccuuccucgcugc

SEQ ID NO: 667 - RNA, 20 nt, Artificial Sequence
  CasM.19952
aagguacaugugcaggaugu

SEQ ID NO: 668 - RNA, 20 nt, Artificial Sequence
  CasM.19952
gcaaccaguagcccuugcgu

SEQ ID NO: 669 - RNA, 20 nt, Artificial Sequence
  CasM.19952
cacuuucuuucuuuguccuu

SEQ ID NO: 670 - RNA, 20 nt, Artificial Sequence
  CasM.19952
guguucaguggauuagaaac

SEQ ID NO: 671 - RNA, 20 nt, Artificial Sequence
  CasM.19952
gagaagaagcugcuacaucu

SEQ ID NO: 672 - RNA, 20 nt, Artificial Sequence
  CasM.19952
uuaacaaauauuauuagcag

SEQ ID NO: 673 - RNA, 20 nt, Artificial Sequence
  CasM.19952
uccuacccccaccccauccc

SEQ ID NO: 674 - RNA, 20 nt, Artificial Sequence
  CasM.19952
gagauggacaauggcccggg

SEQ ID NO: 675 - RNA, 20 nt, Artificial Sequence
  CasM.19952
cuccguguaccucuguuccu

SEQ ID NO: 676 - RNA, 20 nt, Artificial Sequence
  CasM.19952
guggagaagauugaauucag

SEQ ID NO: 677 - RNA, 20 nt, Artificial Sequence
  CasM.19952
uacggggugcucuccaagaa

SEQ ID NO: 678 - RNA, 20 nt, Artificial Sequence
  CasM.19952
ugggguaaaaaggacaagag

SEQ ID NO: 679 - RNA, 20 nt, Artificial Sequence
  CasM.286251
aaaaggcggacgcacuccgg

SEQ ID NO: 680 - RNA, 20 nt, Artificial Sequence
  CasM.286251
ggggagggacuccguccaga

SEQ ID NO: 681 - RNA, 20 nt, Artificial Sequence
  CasM.286251
gagaccauauucuguggcug

SEQ ID NO: 682 - RNA, 20 nt, Artificial Sequence
  CasM.286251
agguguauagguggaaagac

SEQ ID NO: 683 - RNA, 20 nt, Artificial Sequence
  CasM.286251
uucucuucggguuccucggu

SEQ ID NO: 684 - RNA, 20 nt, Artificial Sequence
  CasM.286251
gagcaaauuacgauugaagu

SEQ ID NO: 685 - RNA, 20 nt, Artificial Sequence
  CasM.286251
cgauugaaguuuagaaacau

SEQ ID NO: 686 - RNA, 20 nt, Artificial Sequence
  CasM.286251
aaguuuagaaacaugguugg

SEQ ID NO: 687 - RNA, 20 nt, Artificial Sequence
  CasM.286251
ucggaggagggcgggagacg

SEQ ID NO: 688 - RNA, 20 nt, Artificial Sequence
  CasM.286251
aucucuccugcggguaaaaa

SEQ ID NO: 689 - RNA, 20 nt, Artificial Sequence
  CasM.286251
gcuuuucccuuccuucccuc

SEQ ID NO: 690 - RNA, 20 nt, Artificial Sequence
  CasM.286251
acauuagcuuuucccuuccu

SEQ ID NO: 691 - RNA, 20 nt, Artificial Sequence
  CasM.286251
acuaggucuagaucagagcg

SEQ ID NO: 692 - RNA, 20 nt, Artificial Sequence
  CasM.286251
gcgccaaaggauggcuucuc

SEQ ID NO: 693 - RNA, 20 nt, Artificial Sequence
  CasM.286251
ggagaagccauccuuuggcg

SEQ ID NO: 694 - RNA, 20 nt, Artificial Sequence
  CasM.286251
gggaacuaaucucaacgcug

SEQ ID NO: 695 - RNA, 20 nt, Artificial Sequence
  CasM.286251
gucaaguuugccuugucaag

SEQ ID NO: 696 - RNA, 20 nt, Artificial Sequence
  CasM.286251
gccagccuugccuugaccaa

SEQ ID NO: 697 - RNA, 20 nt, Artificial Sequence
  CasM.286251
gucaaggcaaggcuggccaa

SEQ ID NO: 698 - RNA, 20 nt, Artificial Sequence
  CasM.286251
agauaguguggggaaggggc

SEQ ID NO: 699 - RNA, 20 nt, Artificial Sequence
  CasM.286251
gcagugguuucuaaggaaaa

SEQ ID NO: 700 - RNA, 20 nt, Artificial Sequence
  CasM.286251
gagaaaaacuggaaugacug

SEQ ID NO: 701 - RNA, 20 nt, Artificial Sequence
  CasM.286251
guacaugcuuuagcuuuaaa

SEQ ID NO: 702 - RNA, 20 nt, Artificial Sequence
  CasM.286251
agagauaauggcaaaaguca

SEQ ID NO: 703 - RNA, 20 nt, Artificial Sequence
  CasM.286251
guucggagaagaagcugcua

SEQ ID NO: 704 - RNA, 20 nt, Artificial Sequence
  CasM.286251
ugcgggggaagauguagcag

SEQ ID NO: 705 - RNA, 20 nt, Artificial Sequence
  CasM.286251
ucuuuuagaauuugggagcc

SEQ ID NO: 706 - RNA, 20 nt, Artificial Sequence
  CasM.286251
ggucauugucuuuuagaauu

SEQ ID NO: 707 - RNA, 20 nt, Artificial Sequence
  CasM.286251
ugggggagggccggagcugg

SEQ ID NO: 708 - RNA, 20 nt, Artificial Sequence
  CasM.286251
ugggggagggccggagcugg

SEQ ID NO: 709 - RNA, 20 nt, Artificial Sequence
  CasM.286251
ugggggagggccggagcugg

SEQ ID NO: 710 - RNA, 20 nt, Artificial Sequence
  CasM.286251
gccagcgccgccaggcucac

SEQ ID NO: 711 - protein, 10 aa, Artificial Sequence
  XTEN10 linker
GSPAGSPTST

SEQ ID NO: 712 - protein, 7 aa, Artificial Sequence
  CasM.19952
PKKKRKV

SEQ ID NO: 713 - protein, 166 aa, Artificial Sequence
  Fusion effector sequences
SEVEFSHEYWMRHALTLAKRARDEREVPVGAVLVLNNRVIGEGWNRAIGLHDPTAHAEIMALRQGGLVMQNYRLIDATLYVTFEPCVMCAGAMIHSRIGRVVFGVRNSKRGAAGSLMNVLNYPGMNHRVEITEGILADECAALLCDFYRMPRQVFNAQKKAQSSIN

SEQ ID NO: 714 - protein, 166 aa, Artificial Sequence
  Fusion effector sequences
SEVEFSHEYWMRHALTLAKRARDEREVPVGAVLVLNNRVIGEGWNRAIGLHDPTAHAEIMALRQGGLVMQNYRLYDATLYSTFEPCVMCAGAMIHSRIGRVVFGVRNAKTGAAGSLMDVLHHPGMNHRVEITEGILADECAALLCRFFRMPRRVFNAQKKAQSSTD

SEQ ID NO: 715 - RNA, 20 nt, Artificial Sequence
  Guide Spacer Sequences
cuccguggccuuagcugugc

SEQ ID NO: 716 - RNA, 20 nt, Artificial Sequence
  Guide Spacer Sequences
gugaggaagcaccugagccc

SEQ ID NO: 717 - RNA, 20 nt, Artificial Sequence
  Guide Spacer Sequences
cugcaucccugcucaggcua

SEQ ID NO: 718 - RNA, 20 nt, Artificial Sequence
  Guide Spacer Sequences
uccuggagagaacaggcaau

SEQ ID NO: 719 - RNA, 20 nt, Artificial Sequence
  Guide Spacer Sequences
cagcucucagccaccuuccc

SEQ ID NO: 720 - RNA, 20 nt, Artificial Sequence
  Guide Spacer Sequences
ggaccuaaagaaacuggagu

SEQ ID NO: 721 - RNA, 20 nt, Artificial Sequence
  Guide Spacer Sequences
accagcuugacaucacagga

SEQ ID NO: 722 - RNA, 20 nt, Artificial Sequence
  Guide Spacer Sequences
gaacccaaucacugacaggu

SEQ ID NO: 723 - RNA, 20 nt, Artificial Sequence
  TRAC_5
gugaauaggcagacagacuu

SEQ ID NO: 724 - RNA, 20 nt, Artificial Sequence
  CIITA_15
cagaugcaguuauuguacaa

SEQ ID NO: 725 - RNA, 20 nt, Artificial Sequence
  Guide Spacer Sequences
cgagcacagcuaaggccacg

SEQ ID NO: 726 - RNA, 20 nt, Artificial Sequence
  Guide Spacer Sequences
cuccaucagccacugaccug

SEQ ID NO: 727 - RNA, 20 nt, Artificial Sequence
  Guide Spacer Sequences
gggacgagggugucucgcag

SEQ ID NO: 728 - protein, 469 aa, Artificial Sequence
  CasM.286251
MPTITRKIELTLCTEGLSDQERKDQWNLLYHINDNLYRAANNISSKLYLDDHVGSMVRLKHAEYLSLLRALEKAKKQKAPDEEVIAELSQQVATAEQEMDEQAKAICQYATEMSTQTLSYRFATELETNIFGQILTCLRQGVFSTFNSDARDVKRGERSIRTYKKGMPIPFPWNDSLRIGFEDGEFYLRWYNGLRFRFDFGKDRSNNCLIVQRCMKMDKDYEGDYKLCNSSIQMVKREGKPKFFLLLVVNIPQERVELNKNIVVGVALGINAPAYVATNTTPERKQIGDREHFLNERMAFQRRFKSLQRLKGTTGGRGRAKKLEPLERLRKAEQNWVHTQNHLFSREVIDFAVKARAATIHMEDLSGFGKDNDGNADERKEFVLRNWSYYELQNMITYKAAKYGIKVEKIRPAYTSKTCSWCGHQGFREGITFICENPECKKFGEKEHADYNAARNIANSKEIIKNNEE

SEQ ID NO: 729 - protein, 468 aa, Artificial Sequence
  CasM.19952
MPTITRKIELTLLTEGLSEEQRKEQWGLLYHINDNLYKAANNISSKLYLDDHVSSMVRMKHAEYLSLLKELARAEKQKTPDADAIAELRKKVAAAEKEMTDQEHAICKYATEMSTQSLSYRFATELETNIFAKILDCLKQGVFATFNSDARDVKRGERAIRNYKKGMPIPFAWDKSLRIEKDNKDFYLRWYNGLRFLFNFGKDRSNNRLIVERCLKMDADYDGEYKLCNSSIQIAKREGKTKLFLLLVVKIPQEHVELNKKVVVGVALGINVPAYVATNITEERKAIGDREHFLNSRMAFQRRYKSLQRLRGTAGGKGRAKKLEPLERLRKAEHNWVHTQNHLFSREVVDFAVKSHAATIHMEDLSGFGKDNDGNADERKEFVLRNWSYYELQNMIAYKAAKYGIKVEKIHPAYTSKTCSWCGQLGFREGVTFICENPECKQCGEKVHADYNAARNIANSKDIIKKNE

SEQ ID NO: 730 - protein, 468 aa, Artificial Sequence
  CasM.19952
MPTITRKIELTLLTEGLSEEQRKEQWGLLYHINDNLYKAANNISSKLYLDDHVSSMVRMKHAEYLSLLKELARAEKQKTPDADAIAELRKKVAAAEKEMTDQEHAICKYATEMSTQSLSYRFATELETNIFAKILDCLKQGVFATFNSDARDVKRGERAIRNYKKGMPIPFAWDKSLRIEKDNKDFYLRWYNGLRFLFNFGKDRSNNRLIVERCLKMDADYDGEYKLCNSSIQIAKREGKTKLFLLLVVKIPQEHVELNKKVVVGVNLGINVPAYVATNITEERKAIGDREHFLNSRMAFQRRYKSLQRLRGTAGGKGRAKKLEPLERLRKAEHNWVHTQNHLFSREVVDFAVKSHAATIHMEDLSGFGKDNDGNADERKEFVLRNWSYYELQNMIAYKAAKYGIKVEKIHPAYTSKTCSWCGQLGFREGVTFICENPECKQCGEKVHADYNAARNIANSKDIIKKNE

SEQ ID NO: 731 - protein, 468 aa, Artificial Sequence
  CasM.19952
MPTITRKIELTLLTEGLSEEQRKEQWGLLYHINDNLYKAANNISSKLYLDDHVSSMVRMKHAEYLSLLKELARAEKQKTPDADAIAELRKKVAAAEKEMTDQEHAICKYATEMSTQSLSYRFATELETNIFAKILDCLKQGVFATFNSDARDVKRGERAIRNYKKGMPIPFAWDKSLRIEKDNKDFYLRWYNGLRFLFNFGKDRSNNRLIVERCLKMDADYDGEYKLCNSSIQIAKREGKTKLFLLLVVKIPQEHVELNKKVVVGVDLGINVPAYVATNITEERKAIGDREHFLNSRMAFQRRYKSLQRLRGTAGGKGRAKKLEPLERLRKAEHNWVHTQNHLFSREVVDFAVKSHAATIHMQDLSGFGKDNDGNADERKEFVLRNWSYYELQNMIAYKAAKYGIKVEKIHPAYTSKTCSWCGQLGFREGVTFICENPECKQCGEKVHADYNAARNIANSKDIIKKNE

SEQ ID NO: 732 - protein, 198 aa, Artificial Sequence
  Fusion effector sequences
EASPASGPRHLMDPHIFTSNFNNGIGRHKTYLCYEVERLDNGTSVKMDQHRGFLHNQAKNLLCGFYGRHAELRFLDLVPSLQLDPAQIYRVTWFISWSPCFSWGCAGEVRAFLQENTHVRLRIFAARIYDYDPLYKEALQMLRDAGAQVSIMTYDEFKHCWDTFVDHQGCPFQPWDGLDEHSQALSGRLRAILQNQGN

SEQ ID NO: 733 - skipped

SEQ ID NO: 734 - protein, 40 aa, Artificial Sequence
  XTEN40
GSPAGSPTSTEEGTSESATPESGPGTSTEPSEGSAPGSPA

SEQ ID NO: 735 - protein, 80 aa, Artificial Sequence
  XTEN80
GSPAGSPTSTEEGTSESATPESGPGTSTEPSEGSAPGSPAGSPTSTEEGTSTEPSEGSAPGTSTEPSEGSAPGTSESATP

SEQ ID NO: 736 - RNA, 124 nt, Artificial Sequence
  sgRNA guide nucleic acid
aauaggauuuauccuauggggcaguugguugcccuuagccugaggcauuuauugcacucgggaaguaccuuauuucauugagcaacagaaaggguacauccaacucuaggcgcccgcuaaguuc

SEQ ID NO: 737 - RNA, 104 nt, Artificial Sequence
  sgRNA guide nucleic acid
aauaggauuuauccuauggggcaguugguugcccuuagccugaggcauuuauugcacucgggaaguaccuuauuucauugagcaacagaaaggguacauccaac

SEQ ID NO: 738 - RNA, 124 nt, Artificial Sequence
  sgRNA guide nucleic acid
aauaggauuuauccuauggggcaguugguugcccuuagccugaggcauuuauugcacucgggaaguaccuuauuucauugagcaacagaaaggguacauccaacggacaaaguuuagggcgucg

SEQ ID NO: 739 - RNA, 124 nt, Artificial Sequence
  sgRNA guide nucleic acid
aauaggauuuauccuauggggcaguugguugcccuuagccugaggcauuuauugcacucgggaaguaccuuauuucauugagcaacagaaaggguacauccaacauaagcgucagagcgccgag

SEQ ID NO: 740 - RNA, 124 nt, Artificial Sequence
  sgRNA guide nucleic acid
aauaggauuuauccuauggggcaguugguugcccuuagccugaggcauuuauugcacucgggaaguaccuuauuucauugagcaacagaaaggguacauccaaccuccguggccuuagcugugc

SEQ ID NO: 741 - RNA, 124 nt, Artificial Sequence
  sgRNA guide nucleic acid
aauaggauuuauccuauggggcaguugguugcccuuagccugaggcauuuauugcacucgggaaguaccuuauuucauugagcaacagaaaggguacauccaacgauggaugaaacccagacac

SEQ ID NO: 742 - RNA, 124 nt, Artificial Sequence
  sgRNA guide nucleic acid
aauaggauuuauccuauggggcaguugguugcccuuagccugaggcauuuauugcacucgggaaguaccuuauuucauugagcaacagaaaggguacauccaacugaugauucugcccuccucc

SEQ ID NO: 743 - RNA, 124 nt, Artificial Sequence
  sgRNA guide nucleic acid
aauaggauuuauccuauggggcaguugguugcccuuagccugaggcauuuauugcacucgggaaguaccuuauuucauugagcaacagaaaggguacauccaacaguacaucuucaagccaucc

SEQ ID NO: 744 - RNA, 124 nt, Artificial Sequence
  sgRNA guide nucleic acid
aauaggauuuauccuauggggcaguugguugcccuuagccugaggcauuuauugcacucgggaaguaccuuauuucauugagcaacagaaaggguacauccaacgaccuaagggagagccagga

SEQ ID NO: 745 - RNA, 124 nt, Artificial Sequence
  sgRNA guide nucleic acid
aauaggauuuauccuauggggcaguugguugcccuuagccugaggcauuuauugcacucgggaaguaccuuauuucauugagcaacagaaaggguacauccaacggaagauucugauguggaaa

SEQ ID NO: 746 - RNA, 103 nt, Artificial Sequence
  sgRNA guide nucleic acid
ggggcaguuggaugcccuuaugcugagggauuauuccacucggcaaguaccaauaauaauggaugugaaaagguacauccaacugaguggggcagugggggcg

SEQ ID NO: 747 - RNA, 83 nt, Artificial Sequence
  sgRNA guide nucleic acid
ggggcaguuggaugcccuuaugcugagggauuauuccacucggcaaguaccaauaauaauggaugugaaaagguacauccaac

SEQ ID NO: 748 - RNA, 103 nt, Artificial Sequence
  sgRNA guide nucleic acid
ggggcaguuggaugcccuuaugcugagggauuauuccacucggcaaguaccaauaauaauggaugugaaaagguacauccaacucggggggcgggggggagaa

SEQ ID NO: 749 - RNA, 106 nt, Artificial Sequence
  sgRNA guide nucleic acid
cgggugguugcacauccgaagggugaggauuuauucacucacuaauacuacaaauggaaaaauuuaaaggaaaauguaaaugcaaccucacgucauccagcagaga

SEQ ID NO: 750 - RNA, 86 nt, Artificial Sequence
  sgRNA guide nucleic acid
cgggugguugcacauccgaagggugaggauuuauucacucacuaauacuacaaauggaaaaauuuaaaggaaaauguaaaugcaac

SEQ ID NO: 751 - RNA, 106 nt, Artificial Sequence
  sgRNA guide nucleic acid
cgggugguugcacauccgaagggugaggauuuauucacucacuaauacuacaaauggaaaaauuuaaaggaaaauguaaaugcaacuugugcuguaggaagcucau

SEQ ID NO: 752 - RNA, 106 nt, Artificial Sequence
  sgRNA guide nucleic acid
cgggugguugcacauccgaagggugaggauuuauucacucacuaauacuacaaauggaaaaauuuaaaggaaaauguaaaugcaacaugagagcaagugggcugau

SEQ ID NO: 753 - RNA, 106 nt, Artificial Sequence
  sgRNA guide nucleic acid
cgggugguugcacauccgaagggugaggauuuauucacucacuaauacuacaaauggaaaaauuuaaaggaaaauguaaaugcaacagguggcagcggcuugaucc

SEQ ID NO: 754 - RNA, 106 nt, Artificial Sequence
  sgRNA guide nucleic acid
cgggugguugcacauccgaagggugaggauuuauucacucacuaauacuacaaauggaaaaauuuaaaggaaaauguaaaugcaacgccaaaggcaugugagguac

SEQ ID NO: 755 - RNA, 106 nt, Artificial Sequence
  sgRNA guide nucleic acid
cgggugguugcacauccgaagggugaggauuuauucacucacuaauacuacaaauggaaaaauuuaaaggaaaauguaaaugcaacgggcagcugguggaauuuuu

SEQ ID NO: 756 - RNA, 106 nt, Artificial Sequence
  sgRNA guide nucleic acid
cgggugguugcacauccgaagggugaggauuuauucacucacuaauacuacaaauggaaaaauuuaaaggaaaauguaaaugcaaccagguugagaacuuguugcu

SEQ ID NO: 757 - RNA, 106 nt, Artificial Sequence
  sgRNA guide nucleic acid
cgggugguugcacauccgaagggugaggauuuauucacucacuaauacuacaaauggaaaaauuuaaaggaaaauguaaaugcaacucccgacccucccgucgccg

SEQ ID NO: 758 - RNA, 106 nt, Artificial Sequence
  sgRNA guide nucleic acid
cgggugguugcacauccgaagggugaggauuuauucacucacuaauacuacaaauggaaaaauuuaaaggaaaauguaaaugcaacggacgagccuacccgucccc

SEQ ID NO: 759 - RNA, 106 nt, Artificial Sequence
  sgRNA guide nucleic acid
cgggugguugcacauccgaagggugaggauuuauucacucacuaauacuacaaauggaaaaauuuaaaggaaaauguaaaugcaacucggggggcgggggggagaa

SEQ ID NO: 760 - RNA, 214 nt, Artificial Sequence
  sgRNA guide nucleic acid
ugaaauauugauugaggucgccguuuacguugcgucacaagggcgcgcgggcgaccgaaggccgaucuguacggccugcagguugagaaggcacauauuagaggaaaauugcuucccuuuguguucgcucaccgaguauuccuuguuauuugcggcaagaaacugucuuaauuguuugaaagggugcauacaggaccucaaauuccuccucaga

SEQ ID NO: 761 - RNA, 194 nt, Artificial Sequence
  sgRNA guide nucleic acid
ugaaauauugauugaggucgccguuuacguugcgucacaagggcgcgcgggcgaccgaaggccgaucuguacggccugcagguugagaaggcacauauuagaggaaaauugcuucccuuuguguucgcucaccgaguauuccuuguuauuugcggcaagaaacugucuuaauuguuugaaagggugcauacagg

SEQ ID NO: 762 - RNA, 159 nt, Artificial Sequence
  sgRNA guide nucleic acid
aagcaaccgcguacacgcggacgaacggccgaccugcucggccugaagguugagaagguuauguauaagaggagaaaaucccccuucauaaucgcucaccaagcucccaauuuacauauuuugaaagggcgcaugcaggaccucaaauuccuccucaga

SEQ ID NO: 763 - RNA, 139 nt, Artificial Sequence
  sgRNA guide nucleic acid
aagcaaccgcguacacgcggacgaacggccgaccugcucggccugaagguugagaagguuauguauaagaggagaaaaucccccuucauaaucgcucaccaagcucccaauuuacauauuuugaaagggcgcaugcagg

SEQ ID NO: 764 - RNA, 172 nt, Artificial Sequence
  sgRNA guide nucleic acid
uauugcgcuagccauaauggcaaucgcguacaggcaacugaaggccgaccuguacggccuuaagguugagaaggcacauguaaguggaaaaaugcuuucccguuguguucgcucaccaagcacacacguuugaaauguggggugcuuacaggauccaacagccagggggacu

SEQ ID NO: 765 - RNA, 152 nt, Artificial Sequence
  sgRNA guide nucleic acid
uauugcgcuagccauaauggcaaucgcguacaggcaacugaaggccgaccuguacggccuuaagguugagaaggcacauguaaguggaaaaaugcuuucccguuguguucgcucaccaagcacacacguuugaaauguggggugcuuacagg

SEQ ID NO: 766 - RNA, 172 nt, Artificial Sequence
  sgRNA guide nucleic acid
uauugcgcuagccauaauggcaaucgcguacaggcaacugaaggccgaccuguacggccuuaagguugagaaggcacauguaaguggaaaaaugcuuucccguuguguucgcucaccaagcacacacguuugaaauguggggugcuuacaggauccugugugccccugaugc

SEQ ID NO: 767 - RNA, 172 nt, Artificial Sequence
  sgRNA guide nucleic acid
uauugcgcuagccauaauggcaaucgcguacaggcaacugaaggccgaccuguacggccuuaagguugagaaggcacauguaaguggaaaaaugcuuucccguuguguucgcucaccaagcacacacguuugaaauguggggugcuuacaggaccucaaauuccuccucaga

SEQ ID NO: 768 - RNA, 212 nt, Artificial Sequence
  sgRNA guide nucleic acid
aguaugaggccgccgauaaacguuucgcuagccugacaggcaaucgcgaacgggcggcugaaggccgaccuguacggccugaaggaugagaaggcacauauaaguggaaaauugcuucccguuguguucgcucaccagguacuccuuaauuugaaagcugcaagagcuccuaauuugaggggugcauacaggagaaagagagaguagcgcga

SEQ ID NO: 769 - RNA, 192 nt, Artificial Sequence
  sgRNA guide nucleic acid
aguaugaggccgccgauaaacguuucgcuagccugacaggcaaucgcgaacgggcggcugaaggccgaccuguacggccugaaggaugagaaggcacauauaaguggaaaauugcuucccguuguguucgcucaccagguacuccuuaauuugaaagcugcaagagcuccuaauuugaggggugcauacagg

SEQ ID NO: 770 - RNA, 212 nt, Artificial Sequence
  sgRNA guide nucleic acid
aguaugaggccgccgauaaacguuucgcuagccugacaggcaaucgcgaacgggcggcugaaggccgaccuguacggccugaaggaugagaaggcacauauaaguggaaaauugcuucccguuguguucgcucaccagguacuccuuaauuugaaagcugcaagagcuccuaauuugaggggugcauacagguacuaugggaucaagccgcu

SEQ ID NO: 771 - RNA, 212 nt, Artificial Sequence
  sgRNA guide nucleic acid
aguaugaggccgccgauaaacguuucgcuagccugacaggcaaucgcgaacgggcggcugaaggccgaccuguacggccugaaggaugagaaggcacauauaaguggaaaauugcuucccguuguguucgcucaccagguacuccuuaauuugaaagcugcaagagcuccuaauuugaggggugcauacaggaccucaaauuccuccucaga

SEQ ID NO: 772 - RNA, 186 nt, Artificial Sequence
  sgRNA guide nucleic acid
aacugccgguaagauuacgauagccgaaaggcaauugcguaugcggcaguuaaggccggcucgaacggccugaagguugaguuuaaagucacauauaagcggaaaaaucagauuucccauuguguucgcucaccaauacgcgcaaauuugaaaauguaguucgagguccaggccuaaggaaggagu

SEQ ID NO: 773 - RNA, 166 nt, Artificial Sequence
  sgRNA guide nucleic acid
aacugccgguaagauuacgauagccgaaaggcaauugcguaugcggcaguuaaggccggcucgaacggccugaagguugaguuuaaagucacauauaagcggaaaaaucagauuucccauuguguucgcucaccaauacgcgcaaauuugaaaauguaguucgagg

SEQ ID NO: 774 - RNA, 186 nt, Artificial Sequence
  sgRNA guide nucleic acid
aacugccgguaagauuacgauagccgaaaggcaauugcguaugcggcaguuaaggccggcucgaacggccugaagguugaguuuaaagucacauauaagcggaaaaaucagauuucccauuguguucgcucaccaauacgcgcaaauuugaaaauguaguucgagguuggugaaguagggccuccu

SEQ ID NO: 775 - RNA, 186 nt, Artificial Sequence
  sgRNA guide nucleic acid
aacugccgguaagauuacgauagccgaaaggcaauugcguaugcggcaguuaaggccggcucgaacggccugaagguugaguuuaaagucacauauaagcggaaaaaucagauuucccauuguguucgcucaccaauacgcgcaaauuugaaaauguaguucgaggaauuccggguaucccaggag

SEQ ID NO: 776 - RNA, 186 nt, Artificial Sequence
  sgRNA guide nucleic acid
aacugccgguaagauuacgauagccgaaaggcaauugcguaugcggcaguuaaggccggcucgaacggccugaagguugaguuuaaagucacauauaagcggaaaaaucagauuucccauuguguucgcucaccaauacgcgcaaauuugaaaauguaguucgagguucauugcagaaagagacau

SEQ ID NO: 777 - RNA, 186 nt, Artificial Sequence
  sgRNA guide nucleic acid
aacugccgguaagauuacgauagccgaaaggcaauugcguaugcggcaguuaaggccggcucgaacggccugaagguugaguuuaaagucacauauaagcggaaaaaucagauuucccauuguguucgcucaccaauacgcgcaaauuugaaaauguaguucgaggagaucacgaggaauacaaca

SEQ ID NO: 778 - RNA, 186 nt, Artificial Sequence
  sgRNA guide nucleic acid
aacugccgguaagauuacgauagccgaaaggcaauugcguaugcggcaguuaaggccggcucgaacggccugaagguugaguuuaaagucacauauaagcggaaaaaucagauuucccauuguguucgcucaccaauacgcgcaaauuugaaaauguaguucgaggcagccgggaggagcagcaag

SEQ ID NO: 779 - RNA, 190 nt, Artificial Sequence
  sgRNA guide nucleic acid
accgaggccgcgaaaaacacaacgcuagccgaaaggcaaucgcgggugcgcggccgaaggccgacuagagcggccugaagguugagaagcgugcauguaaacggcagaaaaaaugccuuuuguacgcgcucaccgaacacgucugagcgguuugaaaggugugcucuaggacuaugggaucaagccgcug

SEQ ID NO: 780 - RNA, 170 nt, Artificial Sequence
  sgRNA guide nucleic acid
accgaggccgcgaaaaacacaacgcuagccgaaaggcaaucgcgggugcgcggccgaaggccgacuagagcggccugaagguugagaagcgugcauguaaacggcagaaaaaaugccuuuuguacgcgcucaccgaacacgucugagcgguuugaaaggugugcucuagg

SEQ ID NO: 781 - RNA, 124 nt, Artificial Sequence; identical to SEQ ID NO: 468
  sgRNA guide nucleic acid

SEQ ID NO: 782 - RNA, 104 nt, Artificial Sequence
  sgRNA guide nucleic acid
gggguuguuggaaacccuuaugcugagggauuauuccacucgguaaguaccuuaaauaguuauagaaagauguaaaucaucuauaaaagaaagguacauccaac

SEQ ID NO: 783 - RNA, 124 nt, Artificial Sequence
  sgRNA guide nucleic acid
gggguuguuggaaacccuuaugcugagggauuauuccacucgguaaguaccuuaaauaguuauagaaagauguaaaucaucuauaaaagaaagguacauccaacacuuuccauucucugcugga

SEQ ID NO: 784 - RNA, 131 nt, Artificial Sequence
  sgRNA guide nucleic acid
aagauaugaauaggaguauuccuauggggcaguugguugcccuuagccugagguauuuaaugcacucgggaaguacuuucaacaguauccguuagaaaagguacauccaacguguugcuggagggggccuu

SEQ ID NO: 785 - RNA, 111 nt, Artificial Sequence
  sgRNA guide nucleic acid
aagauaugaauaggaguauuccuauggggcaguugguugcccuuagccugagguauuuaaugcacucgggaaguacuuucaacaguauccguuagaaaagguacauccaac

SEQ ID NO: 786-792 - skipped (7 entries)

SEQ ID NO: 793 - protein, 81 aa, Artificial Sequence
  Prosite motif
KGETFVFLLGRKNWSRTYYFEDQLQNTMKIEKYKAKAEYAGIKVVEKYIVNRPAKYTSQRKRTCSWKCGYQHIGDKFRDNF

SEQ ID NO: 794 - protein, 43 aa, Artificial Sequence
  Prosite motif
TQLNHLRQYFSREAVLIVDENFYAVKNHGAGATIQHMEDNLSG

SEQ ID NO: 795 - protein, 35 aa, Artificial Sequence
  Prosite motif
LNDKPNKEIKVIVLGVDLGIVNSVYPLAYAVASTV

SEQ ID NO: 796 - protein, 46 aa, Artificial Sequence
  Prosite motif
QWGNLLYHINDNLYKRAANNISSKLYLDDEHVSSMVRLMKHADEYL

SEQ ID NO: 797 - protein, 38 aa, Artificial Sequence
  Prosite motif
VLKRGEKRSAILPRNTSYFKRKSGDNMQPILPFIHPWC

SEQ ID NO: 798 - protein, 24 aa, Artificial Sequence
  Prosite motif
NHADYNAASRQNILASINSKKDID

SEQ ID NO: 799 - protein, 37 aa, Artificial Sequence
  Prosite motif
RYLCGKGTTGRGIGHKGRKKRKRLEPLIEYRKLREDG

SEQ ID NO: 800 - protein, 18 aa, Artificial Sequence
  NLS Sequence
KRPAATKKAGQAKKKKEF

SEQ ID NO: 801 - protein, 9 aa, Artificial Sequence
  c-Myc NLS
PAAKRVKLD

SEQ ID NO: 802-804 - skipped (3 entries)

SEQ ID NO: 805 - protein, 8 aa, Artificial Sequence
  NLS Sequence
  misc_feature (3)..(3): Xaa can be any naturally occurring amino acid
  MISC_FEATURE (4)..(4): Xaa = Tryptophan/ Phenylalanine/ Tyrosine
  misc_feature (5)..(6): Xaa can be any naturally occurring amino acid
KRXXXXAF

SEQ ID NO: 806 - skipped

SEQ ID NO: 807 - protein, 6 aa, Artificial Sequence
  NLS Sequence
  MISC_FEATURE (5)..(5): Xaa = Lysine/ Arginine
  MISC_FEATURE (6)..(6): Xaa = Tryptophan/ Phenylalanine/ Tyrosine
LGKRXX

SEQ ID NO: 808 - protein, 17 aa, Artificial Sequence
  NLS Sequence
  misc_feature (3)..(12): Xaa can be any naturally occurring amino acid
KRXXXXXXXXXXKKRKR

SEQ ID NO: 809 - protein, 17 aa, Artificial Sequence
  NLS Sequence
  misc_feature (3)..(12): Xaa can be any naturally occurring amino acid
  misc_feature (16)..(16): Xaa can be any naturally occurring amino acid
  MISC_FEATURE (17)..(17): Xaa = Lysine/ Arginine
KRXXXXXXXXXXKKRXX

SEQ ID NO: 810 - protein, 15 aa, Artificial Sequence
  SV40 NLS
PKKKRKVGIHGVPAA

SEQ ID NO: 811 - protein, 9 aa, Artificial Sequence
  TEV cleavage
ENLYFQSNA

SEQ ID NO: 812 - protein, 879 aa, Artificial Sequence
  Full Uncleaved TEV-Cleavable and MBP tag sequence of CasM. 19952
MKSSHHHHHHHHHHGSSMKIEEGKLVIWINGDKGYNGLAEVGKKFEKDTGIKVTVEHPDKLEEKFPQVAATGDGPDIIFWAHDRFGGYAQSGLLAEITPDKAFQDKLYPFTWDAVRYNGKLIAYPIAVEALSLIYNKDLLPNPPKTWEEIPALDKELKAKGKSALMFNLQEPYFTWPLIAADGGYAFKYENGKYDIKDVGVDNAGAKAGLTFLVDLIKNKHMNADTDYSIAEAAFNKGETAMTINGPWAWSNIDTSKVNYGVTVLPTFKGQPSKPFVGVLSAGINAASPNKELAKEFLENYLLTDEGLEAVNKDKPLGAVALKSYEEELAKDPRIAATMENAQKGEIMPNIPQMSAFWYAVRTAVINAASGRQTVDEALKDAQTNSSSNNNNNNNNNNLGIEENLYFQSNAMPTITRKIELTLLTEGLSEEQRKEQWGLLYHINDNLYKAANNISSKLYLDDHVSSMVRMKHAEYLSLLKELARAEKQKTPDADAIAELRKKVAAAEKEMTDQEHAICKYATEMSTQSLSYRFATELETNIFAKILDCLKQGVFATFNSDARDVKRGERAIRNYKKGMPIPFAWDKSLRIEKDNKDFYLRWYNGLRFLFNFGKDRSNNRLIVERCLKMDADYDGEYKLCNSSIQIAKREGKTKLFLLLVVKIPQEHVELNKKVVVGVDLGINVPAYVATNITEERKAIGDREHFLNSRMAFQRRYKSLQRLRGTAGGKGRAKKLEPLERLRKAEHNWVHTQNHLFSREVVDFAVKSHAATIHMEDLSGFGKDNDGNADERKEFVLRNWSYYELQNMIAYKAAKYGIKVEKIHPAYTSKTCSWCGQLGFREGVTFICENPECKQCGEKVHADYNAARNIANSKDIIKKNE

SEQ ID NO: 813 - protein, 471 aa, Artificial Sequence
  Full cleaved TEV-Cleavable and MBP tag sequence of CasM. 19952
SNAMPTITRKIELTLLTEGLSEEQRKEQWGLLYHINDNLYKAANNISSKLYLDDHVSSMVRMKHAEYLSLLKELARAEKQKTPDADAIAELRKKVAAAEKEMTDQEHAICKYATEMSTQSLSYRFATELETNIFAKILDCLKQGVFATFNSDARDVKRGERAIRNYKKGMPIPFAWDKSLRIEKDNKDFYLRWYNGLRFLFNFGKDRSNNRLIVERCLKMDADYDGEYKLCNSSIQIAKREGKTKLFLLLVVKIPQEHVELNKKVVVGVDLGINVPAYVATNITEERKAIGDREHFLNSRMAFQRRYKSLQRLRGTAGGKGRAKKLEPLERLRKAEHNWVHTQNHLFSREVVDFAVKSHAATIHMEDLSGFGKDNDGNADERKEFVLRNWSYYELQNMIAYKAAKYGIKVEKIHPAYTSKTCSWCGQLGFREGVTFICENPECKQCGEKVHADYNAARNIANSKDIIKKNE

SEQ ID NO: 814 - protein, 510 aa, Artificial Sequence
  Full sequence of His and GFP tagged CasM. 19952
MKSSHHHHHHHGSSMPTITRKIELTLLTEGLSEEQRKEQWGLLYHINDNLYKAANNISSKLYLDDHVSSMVRMKHAEYLSLLKELARAEKQKTPDADAIAELRKKVAAAEKEMTDQEHAICKYATEMSTQSLSYRFATELETNIFAKILDCLKQGVFATFNSDARDVKRGERAIRNYKKGMPIPFAWDKSLRIEKDNKDFYLRWYNGLRFLFNFGKDRSNNRLIVERCLKMDADYDGEYKLCNSSIQIAKREGKTKLFLLLVVKIPQEHVELNKKVVVGVDLGINVPAYVATNITEERKAIGDREHFLNSRMAFQRRYKSLQRLRGTAGGKGRAKKLEPLERLRKAEHNWVHTQNHLFSREVVDFAVKSHAATIHMEDLSGFGKDNDGNADERKEFVLRNWSYYELQNMIAYKAAKYGIKVEKIHPAYTSKTCSWCGQLGFREGVTFICENPECKQCGEKVHADYNAARNIANSKDIIKKNEGSDGGSGGGSTSRDHMVLHEYVNAAGIT

SEQ ID NO: 815 - protein, 547 aa, Artificial Sequence
  Full uncleaved sequence of T2A tagged CasM. 19952
MDYKDHDGDYKDHDIDYKDDDDKMAPKKKRKVGIHGVPAAMPTITRKIELTLLTEGLSEEQRKEQWGLLYHINDNLYKAANNISSKLYLDDHVSSMVRMKHAEYLSLLKELARAEKQKTPDADAIAELRKKVAAAEKEMTDQEHAICKYATEMSTQSLSYRFATELETNIFAKILDCLKQGVFATFNSDARDVKRGERAIRNYKKGMPIPFAWDKSLRIEKDNKDFYLRWYNGLRFLFNFGKDRSNNRLIVERCLKMDADYDGEYKLCNSSIQIAKREGKTKLFLLLVVKIPQEHVELNKKVVVGVDLGINVPAYVATNITEERKAIGDREHFLNSRMAFQRRYKSLQRLRGTAGGKGRAKKLEPLERLRKAEHNWVHTQNHLFSREVVDFAVKSHAATIHMEDLSGFGKDNDGNADERKEFVLRNWSYYELQNMIAYKAAKYGIKVEKIHPAYTSKTCSWCGQLGFREGVTFICENPECKQCGEKVHADYNAARNIANSKDIIKKNEKRPAATKKAGQAKKKKEFGSGEGRGSLLTCGDVEENPGP

SEQ ID NO: 816 - protein, 546 aa, Artificial Sequence
  Cleaved sequence of T2A tagged CasM. 19952
MDYKDHDGDYKDHDIDYKDDDDKMAPKKKRKVGIHGVPAAMPTITRKIELTLLTEGLSEEQRKEQWGLLYHINDNLYKAANNISSKLYLDDHVSSMVRMKHAEYLSLLKELARAEKQKTPDADAIAELRKKVAAAEKEMTDQEHAICKYATEMSTQSLSYRFATELETNIFAKILDCLKQGVFATFNSDARDVKRGERAIRNYKKGMPIPFAWDKSLRIEKDNKDFYLRWYNGLRFLFNFGKDRSNNRLIVERCLKMDADYDGEYKLCNSSIQIAKREGKTKLFLLLVVKIPQEHVELNKKVVVGVDLGINVPAYVATNITEERKAIGDREHFLNSRMAFQRRYKSLQRLRGTAGGKGRAKKLEPLERLRKAEHNWVHTQNHLFSREVVDFAVKSHAATIHMEDLSGFGKDNDGNADERKEFVLRNWSYYELQNMIAYKAAKYGIKVEKIHPAYTSKTCSWCGQLGFREGVTFICENPECKQCGEKVHADYNAARNIANSKDIIKKNEKRPAATKKAGQAKKKKEFGSGEGRGSLLTCGDVEENPG

SEQ ID NO: 817 - protein, 411 aa, Artificial Sequence
  N-terminus sequence of TEV-cleavable MBP tag before CasM. 19952
MKSSHHHHHHHHHHGSSMKIEEGKLVIWINGDKGYNGLAEVGKKFEKDTGIKVTVEHPDKLEEKFPQVAATGDGPDIIFWAHDRFGGYAQSGLLAEITPDKAFQDKLYPFTWDAVRYNGKLIAYPIAVEALSLIYNKDLLPNPPKTWEEIPALDKELKAKGKSALMFNLQEPYFTWPLIAADGGYAFKYENGKYDIKDVGVDNAGAKAGLTFLVDLIKNKHMNADTDYSIAEAAFNKGETAMTINGPWAWSNIDTSKVNYGVTVLPTFKGQPSKPFVGVLSAGINAASPNKELAKEFLENYLLTDEGLEAVNKDKPLGAVALKSYEEELAKDPRIAATMENAQKGEIMPNIPQMSAFWYAVRTAVINAASGRQTVDEALKDAQTNSSSNNNNNNNNNNLGIEENLYFQSNA

SEQ ID NO: 818 - protein, 10 aa, Artificial Sequence
  10X His tag
HHHHHHHHHH

SEQ ID NO: 819 - protein, 367 aa, Artificial Sequence
  MBP tag
MKIEEGKLVIWINGDKGYNGLAEVGKKFEKDTGIKVTVEHPDKLEEKFPQVAATGDGPDIIFWAHDRFGGYAQSGLLAEITPDKAFQDKLYPFTWDAVRYNGKLIAYPIAVEALSLIYNKDLLPNPPKTWEEIPALDKELKAKGKSALMFNLQEPYFTWPLIAADGGYAFKYENGKYDIKDVGVDNAGAKAGLTFLVDLIKNKHMNADTDYSIAEAAFNKGETAMTINGPWAWSNIDTSKVNYGVTVLPTFKGQPSKPFVGVLSAGINAASPNKELAKEFLENYLLTDEGLEAVNKDKPLGAVALKSYEEELAKDPRIAATMENAQKGEIMPNIPQMSAFWYAVRTAVINAASGRQTVDEALKDAQT

SEQ ID NO: 820 - protein, 14 aa, Artificial Sequence
  N-terminus His6 tag plus linker before CasM. 19952
MKSSHHHHHHHGSS

SEQ ID NO: 821 - protein, 28 aa, Artificial Sequence
  C-terminus Linker-GFP11 tag after CasM. 19952
GSDGGSGGGSTSRDHMVLHEYVNAAGIT

SEQ ID NO: 822 - protein, 40 aa, Artificial Sequence
  N terminus of T2A tagged effector protein
MDYKDHDGDYKDHDIDYKDDDDKMAPKKKRKVGIHGVPAA

SEQ ID NO: 823 - protein, 23 aa, Artificial Sequence
  3x FLAG tag of N terminus of T2A tagged effector protein
MDYKDHDGDYKDHDIDYKDDDDK

SEQ ID NO: 824 - protein, 39 aa, Artificial Sequence
  C terminus of T2A tagged effector protein
KRPAATKKAGQAKKKKEFGSGEGRGSLLTCGDVEENPGP

SEQ ID NO: 825 - protein, 16 aa, Artificial Sequence
  NLS (nucleoplasmin) of C terminus of T2A tagged effector protein
KRPAATKKAGQAKKKK

SEQ ID NO: 826 - protein, 21 aa, Artificial Sequence
  T2A self-cleaving peptide sequence
GSGEGRGSLLTCGDVEENPGP

SEQ ID NO: 827 - RNA, 33 nt, Artificial Sequence
  crRNA guide nucleic acid
cguugcagcucgcacguuggcacugguugaagg

SEQ ID NO: 828 - RNA, 34 nt, Artificial Sequence
  crRNA guide nucleic acid
cguugcagcucgcacguuggcacuggguugaagg

SEQ ID NO: 829 - RNA, 17 nt, Artificial Sequence
  sgRNA guide nucleic acid
uuggcacugguugaagg

SEQ ID NO: 830 - RNA, 13 nt, Artificial Sequence
  sgRNA guide nucleic acid
cacugguugaagg

SEQ ID NO: 831 - RNA, 32 nt, Artificial Sequence
  crRNA guide nucleic acid
guugcaacucacgcgcguauguggcuugaagg

SEQ ID NO: 832 - RNA, 32 nt, Artificial Sequence
  crRNA guide nucleic acid
guugcaauucauaucuccggguggauugaagg

SEQ ID NO: 833 - RNA, 17 nt, Artificial Sequence
  sgRNA guide nucleic acid
agcguguggcuugaagg

SEQ ID NO: 834 - RNA, 13 nt, Artificial Sequence
  sgRNA guide nucleic acid
uguggcuugaagg

SEQ ID NO: 835 - RNA, 32 nt, Artificial Sequence
  crRNA guide nucleic acid
guugcagcgugcgcgagcguguggcuugaagg

SEQ ID NO: 836 - RNA, 32 nt, Artificial Sequence
  crRNA guide nucleic acid
guugcaacucgcacgugaaugcgacuugaagg

SEQ ID NO: 837 - RNA, 17 nt, Artificial Sequence
  sgRNA guide nucleic acid
ugaaugcgacuugaagg

SEQ ID NO: 838 - RNA, 32 nt, Artificial Sequence
  crRNA guide nucleic acid
gaugcaacucguguguaugugcgaguugaagg

SEQ ID NO: 839 - RNA, 32 nt, Artificial Sequence
  crRNA guide nucleic acid
gacgcaacucgcgcgcgggcauguauugaggg

SEQ ID NO: 840 - RNA, 32 nt, Artificial Sequence
  crRNA guide nucleic acid
gaugcaucugacacagcugggugaguugaagg

SEQ ID NO: 841 - RNA, 17 nt, Artificial Sequence
  sgRNA guide nucleic acid
gcugggugaguugaagg

SEQ ID NO: 842 - RNA, 32 nt, Artificial Sequence
  crRNA guide nucleic acid
guugcaacacauguaugugggugaguugaagg

SEQ ID NO: 843 - RNA, 32 nt, Artificial Sequence
  crRNA guide nucleic acid
guugcaauuuguauacgagugugacuugaagg

SEQ ID NO: 844 - RNA, 32 nt, Artificial Sequence
  crRNA guide nucleic acid
gcugcaacacgcgcggguacgcggguugaagg

SEQ ID NO: 845 - RNA, 32 nt, Artificial Sequence
  crRNA guide nucleic acid
guugcaacucgcacguuggcacugauugaagg

SEQ ID NO: 846 - RNA, 36 nt, Artificial Sequence
  crRNA guide nucleic acid
gcuguagcccugcucaaauuguagggcgcaugcagg

SEQ ID NO: 847 - RNA, 36 nt, Artificial Sequence
  crRNA guide nucleic acid
guuguagucgaccugaaucuguggggugcuuacagg

SEQ ID NO: 848 - RNA, 36 nt, Artificial Sequence; identical to SEQ ID NO: 847
  sgRNA guide nucleic acid

SEQ ID NO: 849 - RNA, 36 nt, Artificial Sequence
  crRNA guide nucleic acid
gguguauguaaccgcaauuugaagggugcauacagg

SEQ ID NO: 850 - RNA, 36 nt, Artificial Sequence
  crRNA guide nucleic acid
guuggaaucgaccuuaauuugaggugugcuuacagg

SEQ ID NO: 851 - RNA, 36 nt, Artificial Sequence
  crRNA guide nucleic acid
gcugaaagagcagagaauuuguugugugcauacagg

SEQ ID NO: 852 - RNA, 36 nt, Artificial Sequence
  crRNA guide nucleic acid
guuggagucggcuugaaucugcggggugcuuacagg

SEQ ID NO: 853 - RNA, 36 nt, Artificial Sequence
  crRNA guide nucleic acid
guuguaagagacccgaauuuuagcuguguauacagg

SEQ ID NO: 854 - RNA, 36 nt, Artificial Sequence
  crRNA guide nucleic acid
guugugaaugcaggcauuuuugaugguaaauccaac

SEQ ID NO: 855 - RNA, 36 nt, Artificial Sequence
  crRNA guide nucleic acid
acugucagacaaugcaaaaugugugguacauccaac

SEQ ID NO: 856 - RNA, 10 nt, Artificial Sequence
  sgRNA guide nucleic acid
ugguacaucc

SEQ ID NO: 857 - RNA, 65 nt, Artificial Sequence
  sgRNA guide nucleic acid
uggggcaguugguugcccuuagccugaggcauuuauugcacucgggaaguaccauuacauccaac

SEQ ID NO: 858 - RNA, 23 nt, Artificial Sequence
  sgRNA guide nucleic acid
ugguacauccaacucuaggcgcc

SEQ ID NO: 859 - RNA, 15 nt, Artificial Sequence
  sgRNA guide nucleic acid
aaugguacauccaac

SEQ ID NO: 860 - RNA, 20 nt, Artificial Sequence
  sgRNA guide nucleic acid
ugguacauccaacucuaggc

SEQ ID NO: 861 - RNA, 22 nt, Artificial Sequence
  sgRNA guide nucleic acid
ugguacauccaacucuaggcgc

SEQ ID NO: 862 - RNA, 21 nt, Artificial Sequence
  sgRNA guide nucleic acid
ugguacauccaacucuaggcg

SEQ ID NO: 863 - RNA, 21 nt, Artificial Sequence
  sgRNA guide nucleic acid
ugguacauccaacucuaggcg

SEQ ID NO: 864 - RNA, 21 nt, Artificial Sequence
  sgRNA guide nucleic acid
ugguacauccaacucuaggcg

SEQ ID NO: 865 - RNA, 16 nt, Artificial Sequence
  sgRNA guide nucleic acid
ugguacauccaacucu

SEQ ID NO: 866 - RNA, 15 nt, Artificial Sequence
  sgRNA guide nucleic acid
ugguacauccaacuc

SEQ ID NO: 867 - RNA, 14 nt, Artificial Sequence
  sgRNA guide nucleic acid
ugguacauccaacu

SEQ ID NO: 868 - RNA, 18 nt, Artificial Sequence
  sgRNA guide nucleic acid
ugguacauccaacucuag

SEQ ID NO: 869 - RNA, 13 nt, Artificial Sequence
  sgRNA guide nucleic acid
ugguauauccaac

SEQ ID NO: 870 - RNA, 17 nt, Artificial Sequence
  sgRNA guide nucleic acid
ugguacauccaacucua

SEQ ID NO: 871 - RNA, 14 nt, Artificial Sequence
  sgRNA guide nucleic acid
augguacauccaac

SEQ ID NO: 872 - RNA, 12 nt, Artificial Sequence
  sgRNA guide nucleic acid
ugguacauccaa

SEQ ID NO: 873 - RNA, 11 nt, Artificial Sequence
  sgRNA guide nucleic acid
ugguacaucca

SEQ ID NO: 874 - RNA, 36 nt, Artificial Sequence
  crRNA guide nucleic acid
gcugucaguaguaguaaaaauggggguacauccaac

SEQ ID NO: 875 - RNA, 36 nt, Artificial Sequence
  crRNA guide nucleic acid
acugucaguacaugcaaaaaugaggguacauccaac

SEQ ID NO: 876 - RNA, 36 nt, Artificial Sequence
  crRNA guide nucleic acid
acugucagacaaugcaaaaugagugguacauccaac

SEQ ID NO: 877 - RNA, 36 nt, Artificial Sequence
  crRNA guide nucleic acid
gcuguuagaacauacaaaaugaaagguacauccaac

SEQ ID NO: 878 - RNA, 36 nt, Artificial Sequence
  crRNA guide nucleic acid
gcugcaugucauggcaaaaggaaagguacauccaac

SEQ ID NO: 879 - RNA, 36 nt, Artificial Sequence
  crRNA guide nucleic acid
gcugucagacaccuaaaaaaugaggguacauccaac

SEQ ID NO: 880 - RNA, 36 nt, Artificial Sequence
  crRNA guide nucleic acid
gcugugagucacaguaaaaaugaagguauauccaac

SEQ ID NO: 881 - RNA, 36 nt, Artificial Sequence
  crRNA guide nucleic acid
gauguauaugcuaugauuuuguaugguacauccaac

SEQ ID NO: 882 - RNA, 37 nt, Artificial Sequence
  crRNA guide nucleic acid
guugcagaacccgaauagacgaaugaaggaaugcaac

SEQ ID NO: 883 - RNA, 33 nt, Artificial Sequence
  crRNA guide nucleic acid
guugagcucugcauuacgcagaugaaugacgag

SEQ ID NO: 884 - RNA, 32 nt, Artificial Sequence
  crRNA guide nucleic acid
gauauaucuuguaugcauauguagguugugag

SEQ ID NO: 885 - RNA, 32 nt, Artificial Sequence; identical to SEQ ID NO: 884
  crRNA guide nucleic acid

SEQ ID NO: 886 - RNA, 32 nt, Artificial Sequence
  crRNA guide nucleic acid
gaugcaacuuagaugcauauguaaguugugag

SEQ ID NO: 887 - RNA, 32 nt, Artificial Sequence
  crRNA guide nucleic acid
guugcaaugaacguaugugcaugaggugugag

SEQ ID NO: 888 - RNA, 32 nt, Artificial Sequence
  sgRNA guide nucleic acid
guugcaauucguaugcgcagguaaguuucgag

SEQ ID NO: 889 - RNA, 17 nt, Artificial Sequence
  sgRNA guide nucleic acid
ugugcaugaggugugag

SEQ ID NO: 890 - RNA, 32 nt, Artificial Sequence
  crRNA guide nucleic acid
guugcaaucugcguacaggcguaagaugugag

SEQ ID NO: 891 - RNA, 17 nt, Artificial Sequence
  sgRNA guide nucleic acid
caggcguaagaugugag

SEQ ID NO: 892 - RNA, 32 nt, Artificial Sequence
  crRNA guide nucleic acid
gaucauaucugcuuguauggguaugcugcgag

SEQ ID NO: 893 - RNA, 17 nt, Artificial Sequence
  sgRNA guide nucleic acid
uauggguaugcugcgag

SEQ ID NO: 894 - RNA, 32 nt, Artificial Sequence
  crRNA guide nucleic acid
guugcaacuuacgcauagguguaaaauacgag

SEQ ID NO: 895 - RNA, 32 nt, Artificial Sequence
  crRNA guide nucleic acid
gauuauaucugcuuguauggguauacugcgag

SEQ ID NO: 896 - RNA, 38 nt, Artificial Sequence
  crRNA guide nucleic acid
ucagcucacaaccuacauaugcauacaagauauaucgu

SEQ ID NO: 897 - RNA, 17 nt, Artificial Sequence
  sgRNA guide nucleic acid
cauauguagguugugag

SEQ ID NO: 898 - RNA, 13 nt, Artificial Sequence
  sgRNA guide nucleic acid
uguagguugugag

SEQ ID NO: 899 - RNA, 13 nt, Artificial Sequence
  sgRNA guide nucleic acid
caugaggugugag

SEQ ID NO: 900 - RNA, 17 nt, Artificial Sequence
  sgRNA guide nucleic acid
ugcgguguaauucgagg

SEQ ID NO: 901 - RNA, 36 nt, Artificial Sequence
  crRNA guide nucleic acid
gaugugaacgaccuuuuuuugcggugugcuucgagg

SEQ ID NO: 902 - RNA, 36 nt, Artificial Sequence
  crRNA guide nucleic acid
gguggauaucaucuuaaaaagugagguacauccaac

SEQ ID NO: 903 - RNA, 41 nt, Artificial Sequence
  crRNA guide nucleic acid
  misc_feature (4)..(4): n is a, c, g, or u
crrnaggugugaacgaccuuuuuuugcgguguaauucgagg

SEQ ID NO: 904 - RNA, 18 nt, Artificial Sequence
  sgRNA guide nucleic acid
uugcgguguacuucgagg

SEQ ID NO: 905 - RNA, 17 nt, Artificial Sequence
  sgRNA guide nucleic acid
agaagaaggauugggac

SEQ ID NO: 906 - RNA, 36 nt, Artificial Sequence
  crRNA guide nucleic acid
aaugugaacgaccuucuuuugcgguguacuucgagg

SEQ ID NO: 907 - RNA, 14 nt, Artificial Sequence
  sgRNA guide nucleic acid
aagguugauacagc

SEQ ID NO: 908 - RNA, 36 nt, Artificial Sequence
  crRNA guide nucleic acid
gcuguaagucauggaaaaauggugaguacauccaac

SEQ ID NO: 909 - RNA, 18 nt, Artificial Sequence
  sgRNA guide nucleic acid
auggugaguacauccaac

SEQ ID NO: 910 - RNA, 13 nt, Artificial Sequence
  sgRNA guide nucleic acid
gagcacauccaac

SEQ ID NO: 911 - RNA, 13 nt, Artificial Sequence
  sgRNA guide nucleic acid
ggguacauccaac

SEQ ID NO: 912 - RNA, 36 nt, Artificial Sequence
  crRNA guide nucleic acid
guugcguuugcccgugauuucggguguguauacagg

SEQ ID NO: 913 - RNA, 13 nt, Artificial Sequence
  sgRNA guide nucleic acid
agguauauccaac

SEQ ID NO: 914 - RNA, 36 nt, Artificial Sequence
  crRNA guide nucleic acid
ggcguaugucuaccugaaaaagaagguauauccaac

SEQ ID NO: 915 - RNA, 13 nt, Artificial Sequence
  sgRNA guide nucleic acid
ggcuacauacagc

SEQ ID NO: 916 - RNA, 36 nt, Artificial Sequence
  crRNA guide nucleic acid
gguguaugugcaccauauauguaggugacauacagc

SEQ ID NO: 917 - RNA, 17 nt, Artificial Sequence
  sgRNA guide nucleic acid
aaaacaaggauugaaac

SEQ ID NO: 918 - RNA, 36 nt, Artificial Sequence
  crRNA guide nucleic acid
gaugugaacgaccuuuuuuugcgguguacuucgagg

SEQ ID NO: 919 - RNA, 13 nt, Artificial Sequence
  sgRNA guide nucleic acid
guguacuucgagg

SEQ ID NO: 920 - RNA, 36 nt, Artificial Sequence
  crRNA guide nucleic acid
gauguaaaucaucuauaaaagaaagguacauccaac

SEQ ID NO: 921 - RNA, 12 nt, Artificial Sequence
  sgRNA guide nucleic acid
gguacauccaac

SEQ ID NO: 922 - RNA, 17 nt, Artificial Sequence
  sgRNA guide nucleic acid
cguacguggauugaaac

SEQ ID NO: 923 - RNA, 36 nt, Artificial Sequence
  crRNA guide nucleic acid
gcugcacugcaccgcccauugauggugugcucuagg

SEQ ID NO: 924 - RNA, 36 nt, Artificial Sequence
  crRNA guide nucleic acid
auuguaggcgaccuuuuuuugcgauguaguucgagg

SEQ ID NO: 925 - RNA, 13 nt, Artificial Sequence
  sgRNA guide nucleic acid
auguaguucgagg

SEQ ID NO: 926 - RNA, 36 nt, Artificial Sequence
  crRNA guide nucleic acid
aguguaugauuaccuguaguaugagguacauccaac

SEQ ID NO: 927 - RNA, 36 nt, Artificial Sequence
  sgRNA guide nucleic acid
gcugcaagagcuccuaauuugaggggugcauacagg

SEQ ID NO: 928 - RNA, 36 nt, Artificial Sequence
  crRNA guide nucleic acid
gauaguuuuaacuuccauuugaaauguaaaugcaac

SEQ ID NO: 929 - RNA, 13 nt, Artificial Sequence
  sgRNA guide nucleic acid
auguaaaugcaac

SEQ ID NO: 930-931 - skipped (2 entries)

SEQ ID NO: 932 - RNA, 78 nt, Artificial Sequence
  sgRNA guide nucleic acid
uggggcaguugguugcccuuagccugaggcauuuauugcacucgggaaguaccauuucucagaaaugguauauccaac

SEQ ID NO: 933 - RNA, 55 nt, Artificial Sequence
  sgRNA guide nucleic acid
auggggcaguugguugcccuuagccugaggcauuuaaugcacucgggagaaaaac

SEQ ID NO: 934 - RNA, 65 nt, Artificial Sequence
  sgRNA guide nucleic acid
auggggcaguugguugcccuuagccugaggcauuuaaugcacucgggaaguaccgaaaauccaac

SEQ ID NO: 935 - RNA, 79 nt, Artificial Sequence
  sgRNA guide nucleic acid
auggggcaguugguugcccuuagccugaggcauuuaaugcacucgggaaguaccuuuucucagaaaagguacauccaac

SEQ ID NO: 936 - RNA, 71 nt, Artificial Sequence
  sgRNA guide nucleic acid
auggggcaguugguugcccuuagccugaggcauuuaaugcacucgggaaguaccuuuucucagaaaccaac

SEQ ID NO: 937 - RNA, 136 nt, Artificial Sequence
  sgRNA guide nucleic acid
uuauuagaaaugaaauauuuucuaaugggguuguuggaaagagcuuuuacugaaauuuguaaaggugcccugaacuugagaauugaaaaauuacucgaggaaaugguacauccaacuauuaaauacucguauugcu

SEQ ID NO: 938 - RNA, 189 nt, Artificial Sequence
  tracrRNA guide nucleic acid
cgauuccucccuacaguaguuagguauagccgaaagguagagacuaaaucuguaguuggagugggccgcuugcaucggccuaaaguugagaagugucagacucugauaacccucaacgacgauauucuuuauuucgguucaaaguucugcacaaaacaggugaguccuuauaaaccggugugcagaacg

SEQ ID NO: 939 - RNA, 189 nt, Artificial Sequence; identical to SEQ ID NO: 938
  tracrRNA guide nucleic acid

SEQ ID NO: 940 - RNA, 189 nt, Artificial Sequence; identical to SEQ ID NO: 938
  tracrRNA guide nucleic acid

SEQ ID NO: 941 - RNA, 97 nt, Artificial Sequence
  guide nucleic acid
augaauaggauucguccuauggggcaguugguugcccuuagccugaggcauuuauugcacucgggaaguaccauuucucagaaaugguacauccaac

SEQ ID NO: 942 - RNA, 10 nt, Artificial Sequence
  guide nucleic acid
ugguacaucc

SEQ ID NO: 943 - RNA, 10 nt, Artificial Sequence
  guide nucleic acid
ugguauaucc
